(19) United States
(12) Patent Application Publication
(10) Pub. No.: US 2005/0202438 A1
(43) Pub. Date: Sep. 15, 2005

(54) Rational directed protein evolution using two-dimensional rational mutagenesis scanning

(76) Inventors: Rene Gantier, Elancourt (FR); Thierry Guyon, Palaiseau (FR); Hugo Cruz Ramos, Evry (FR); Manuel Vega, Vigneux-sur-Seine (FR); Lila Drittanti, Vigneux-sur-Seine (FR)

Correspondence Address: FISH & RICHARDSON, PC, 12390 EL CAMINO REAL, SAN DIEGO, CA, 92130-2081, US

(21) Appl. No.: 10/658,355

(22) Filed: Sep. 8, 2003

Related U.S. Application Data
(60) Provisional application No. 60/457,063, filed on Mar. 21, 2003.
(60) Provisional application No. 60/410,258, filed on Sep. 9, 2002.
(60) Provisional application No. 60/457,135, filed on Mar. 21, 2003.
(60) Provisional application No. 60/409,898, filed on Sep. 9, 2002.

(51) Int. Cl. C12Q 1/68; G06F 19/00; G01N 33/48; G01N 33/50; C12N 9/64

(52) U.S. Cl. 435/6; 435/69.1; 435/226; 435/320.1; 435/325; 702/19

(57) ABSTRACT

Rational methods for generating protein variants are provided. Processes and systems for the high throughput directed evolution of peptides and proteins employing the method are provided.

### RELATED APPLICATIONS

[0001] Benefit of priority under 35 U.S.C. §119(e) is claimed to U.S. provisional application Ser. No. 60/457,063, filed Mar. 21, 2003, entitled “RATIONAL EVOLUTION OF CYTOKINES FOR HIGHER STABILITY, ENCODING NUCLEIC ACID MOLECULES AND RELATED APPLICATIONS,” and to U.S. Provisional Application Ser. No. 60/410,258, entitled “RATIONAL EVOLUTION OF CYTOKINES FOR HIGHER STABILITY, ENCODING NUCLEIC ACID MOLECULES AND RELATED APPLICATIONS,” filed Sep. 9, 2002, each to Rene Gantier, Thierry Guyon, Hugo Cruz Ramos, Manuel Vega and Lila Drittanti.

[0002] This application is related to corresponding International PCT application No. attorney docket No. 37851-923PC, entitled RATIONAL DIRECTED PROTEIN EVOLUTION USING TWO-DIMENSIONAL RATIONAL MUTAGENESIS SCANNING. This application also is related to U.S. application Ser. No. attorney docket number 37851-922, entitled “RATIONAL EVOLUTION OF CYTOKINES FOR HIGHER STABILITY, ENCODING NUCLEIC ACID MOLECULES AND RELATED APPLICATIONS,” filed the same day herewith; to U.S. Provisional Application Ser. No. 60/457,135, entitled “RATIONAL EVOLUTION OF CYTOKINES FOR HIGHER STABILITY, ENCODING NUCLEIC ACID MOLECULES AND RELATED APPLICATIONS;” filed Mar. 21, 2003, and to U.S. Provisional Application Ser. No. 60/409,898, entitled “RATIONAL EVOLUTION OF CYTOKINES FOR HIGHER STABILITY, ENCODING NUCLEIC ACID MOLECULES AND RELATED APPLICATIONS,” filed Sep. 9, 2002, each to Rene Gantier, Thierry Guyon, Manuel Vega and Lila Drittanti. This application also is related to co-pending U.S. application Ser. No. 10/022,249, filed Dec. 17, 2001, entitled “HIGH THROUGHPUT DIRECTED EVOLUTION BY RATIONAL MUTAGENESIS,” to Manuel Vega and Lila Drittanti.

[0003] The subject matter of each of the above-noted applications and provisional applications is incorporated by reference in its entirety.

### FIELD OF INVENTION

[0004] Mutant proteins having improved activities, and nucleic acid molecules encoding these proteins are provided. Uses of these proteins for treatment of diseases also are provided.

### BACKGROUND

[0005] Directed evolution refers to biotechnological processes devoted to the optimization of the protein activity by means of changes introduced into selected respective genes. Directed evolution includes the generation of a collection of mutated genes followed by the selection of mutants encoding proteins with desired features. These processes can be iterative when gene products having an improvement in a desired property are subjected to further cycles of mutation, selection and screening. The concept of mutant or mutation is used here in the wide sense of “change.” Directed evolution provides a way to adapt natural proteins to work in new chemical or biological environments, and/or to elicit new functions.

[0006] Proteins intrinsically possess an enormous potential plasticity, which allows them to face new challenges, such as a new environment and a desired new or altered activity. It is possible to take advantage of this plasticity to generate new proteins with altered activity. In a sufficiently large pool of modified mutant proteins, there is a chance of finding an appropriately modified protein having a desired activity. Problems arise, however, in generating and identifying a modified protein having a desired activity. Among the practical approaches intended to tackle these problems, two types can be distinguished. One is a purely predictive approach that is based on the assumption that the optimized proteins can be rationally designed in a predictable manner. This approach, however, requires sufficient information regarding the physiochemical properties of individual amino acids and amino acid sequences that govern protein folding, molecular interactions, intra-molecular forces and other dynamics of protein activity. The predictive approach is extremely dependent on a number of variables and parameters that are not known, even if the secondary and/or tertiary structures of a protein are available.

[0007] In contrast to the predictive approach, random or stochastic approaches have also been employed. One random approach requires synthesis of all possible protein sequences or a statistically sufficient large number of proteins followed by the screening to identify proteins having a desired activity or property. Other random approaches are based on gene shuffling methods, such as, for example, PCR-based methods that generate random rearrangements between or among two or more sequence-related genes to randomly generate variants of the original gene.

[0008] The development and scope of directed evolution, has been limited by both of the approaches described above, and its full potential remains therefore to be exploited. In order to capitalize on the full potential of directed evolution, alternative approaches for generating and identifying evolved proteins are needed. Therefore, among the objects herein, it is an object to provide methods for generating and identifying evolved proteins having desired activities.

### SUMMARY

[0009] Provided herein are methods, designated two-dimensional (2D) rational mutagenesis scanning (also referred to as 2D scanning). These methods employ an indirect search for alteration, typically improvement, of a selected activity particular activity, such as increased resistance to proteolysis or other physical or chemical property. The method uses a rational amino acid replacement and sequence change at single or a limited number of amino acid positions at a time. As a result, optimized proteins having modified amino acid sequences at some regions along the protein that perform differently from, typically better, the starting target protein. Such modified proteins are identified and isolated.

[0010] Target loci in a protein for modification are selected based on properties of the target polyeptide, including i) the particular protein properties to be evolved, ii) the protein's amino acid sequence, and iii) the known properties of the individual amino acids, a number of target amino acid positions along the protein sequence are selected in silico for replacement. The target loci (amino acid positions) along the protein sequence selected in silico for modification, typically replacement, are referred to as “is-HIT target positions.” The number of is-HIT target positions is generally selected to be as large as possible such that all reasonably possible target positions for the particular feature being evolved are identified and included. In particular embodiments less than all are identified.

[0011] The amino acids selected to replace the is-HIT target positions on the particular protein being optimized can be either all of the remaining 19 amino acids or a more restricted group of selected amino acids that are contemplated to have a desired effect on protein activity. In embodiments, where a restricted number of replacement amino acids are used, all of the amino acid positions along the protein backbone can be selected as is-HIT target positions for amino acid replacement.

[0012] To prepare the mutant proteins with replacement amino acids, mutagenesis is performed by the replacement of a single amino acid residue at one is-HIT target position on the protein backbone (e.g., “one-by-one,” such as in addressable arrays), such that each individual mutant generated is the single product of each single mutagenesis reaction. The single amino acid replacement mutagenesis reactions are repeated for each of the replacing amino acids selected at each of the is-HIT target positions. Thus, a plurality of mutant protein molecules are produced, whereby each mutant protein contains a single amino acid replacement at only one of the is-HIT target positions. Activity assessment then is individually performed on each individual protein mutant molecule, following protein expression and measurement of an activity. Preparation and identification of mutations are exemplified herein in the Examples provided herein for modification of activities of IFNα-2b. The positions in polypeptides that contain modifications that lead to a desired alteration in the targeted protein activity are referred to as LEADs.

[0013] Any protein known or otherwise available to those of skill in the art is suitable for modification of an activity or property, such as optimization of a property important for improving use as a therapeutic, using the directed evolution methods provided herein. Such proteins include, but are not limited to, including cytokines, such IFNα-2b, IFNβ and any other proteins, including those that already have been mutated or optimized by other methods.

### DESCRIPTION OF THE FIGURES

[0014] FIG. 1(A) shows a schematic of the initial step in the methods provided herein for 2D-scanning. Once the protein feature(s) to be optimized is (are) selected (indicated as “?”), diverse sources of information or previous knowledge (i.e., protein primary, secondary or tertiary structures, literature, patents) are exploited to determine those amino acid positions that may be amenable to improved protein fitness by replacement with a different amino acid. This step utilizes protein analysis “in silico.” All possible candidate positions that might be involved in the feature being evolved are referred to herein as “in silico HITs” (“is-HITs”). The collection (or library) of all is-HITs identified during this step represents the first dimension (target residue position) of the two-dimensional scanning methods provided herein. The first dimension is restricted because only aminoacids along the protein sequence that are the is-HITs.

[0015] FIG. 1(B) shows a representation of the methods provided herein to identify a collection of LEAD candidates. A series of steps is conducted, in silico as in FIG. 1A, to identify all appropriate replacing amino acids expected to improve fitness when substituted at the is-HIT positions to form candidate LEADs.

[0016] FIG. 2 shows a representation of methods provided herein for identification of LEADs. Based on the positions defined by the is-HITs and on the selected replacing amino acids (e.g., in silico candidate LEADs), a collection (library) of individual mutant molecules is produced (in vitro) such that the native amino acids at the is-HIT positions are replaced by other selected amino acids. The replacing amino acids are any of the remaining 19 amino acids so that all 20 natural amino acids are in the position, although typically they are a smaller group of selected amino acids with sets of properties appropriate to the evolving feature. Often only a subset of amino acids are used as a replacing amino acid so that the second dimension is restricted. The collection of mutant molecules, or in silico candidate LEADS, is generated, tested and phenotypically characterized one-by-one, for example, in addressable arrays. Each individual mutant in the collection is designed and produced as the single product of an independent mutagenesis reaction. Mutant molecules are such that each molecule contains one and only one mutation. Those molecules displaying improved fitness for the evolving feature are called LEADs.

[0017] FIG. 3(A) shows a further step in the methods provided herein for rational evolution of peptides and proteins. Following identification of LEADs, a new collection of mutant molecules is obtained by combination of any two or more of the mutations present in the LEAD molecules. The collection of new mutant molecules is generated, tested and phenotypically characterized such as in the the one-by-one in addressable arrays exemplified in the Figure. Each individual mutant in the collection is designed and produced as the single product of an independent mutagenesis reaction. Mutant molecules are such that each molecule contains a variable number and type of LEAD mutations. Those molecules displaying further improved fitness for the evolving feature, are referred to herein as super-LEADs.

[0018] FIG. 3(B) shows an embodiment of the methods provided herein intended to redesign proteins such that they maintain levels and type of activity comparable to those of the native protein while their sequences are significantly changed by amino acid replacement. Pseudo-wild type amino acids are those amino acids that are different from the native amino acid at a given amino acid position and replace the native residue at that position without introducing any measurable change in protein activity. A population of sets of nucleic acid molecules encoding a collection of mutant molecules is generated and phenotypically characterized such that proteins with amino acid sequences different from the native ones but that still elicit the same level and type of activity as the native protein are selected.

[0019] FIG. 4 shows a schematic of the “Additive Directional Mutagenesis” (ADM) methods provided herein. ADM is a repetitive multi-step process such that at each step a new LEAD mutation is added onto the protein being evolved. The process is repeated as many times as necessary until the total number of desired mutations is introduced on the same molecule. The collection of new mutant molecules is generated, tested and phenotypically characterized one-by-one in addressable arrays. Each individual mutant in the collection is designed and produced as the single product of an independent mutagenesis reaction.

[0020] FIG. 5 depicts different levels of biological activity of a protein, designated Rep protein, super-LEADs obtained by ADM. Rep protein is is involved in replication of Adeno associated virus (see, e.g., copending U.S. application Ser. No. 10/022,390, published as US-2003-0129203-A1). It was used to exemplify the ADM method.

[0021] FIG. 6(A) displays the sequence of the mature IFNα-2b. Residues targeted by a mixture of proteases, including α-chymotrypsin (F, L, M, W, and Y), endoproteinase Arg-C (R), endoproteinase Asp-N (D), endoproteinase Glu-C (E), endoproteinase Lys-C (K), and trypsin (K, and R), are underlined and in bold lettering.

[0022] FIG. 6(B) shows the structure of IFNα-2b obtained from the NMR structure of IFNα-2a (PDB Code 1ITF) in ribbon representation. Surface residues exposed to the action of the proteases considered in FIG. 6A are in space filling representation.

[0023] FIG. 7 depicts the “Percent Accepted Mutation” (PAM250) matrix. Values given to identical residues are shown in gray squares. Highest values in the matrix are shown in black squares and correspond to the highest occurrence of substitution between two residues.

[0024] FIG. 8 presents the scores obtained from PAM250 analysis for the amino acid substitutions (replacing amino acids on the vertical axis; amino acid position on the horizontal axis) aimed at introducing resistance to proteolysis into the IFNα-2b at the protease target sequences. The two best replacing residues for each target amino acid according to the highest substitution scores are shown in black rectangles.

[0025] FIG. 9(A) depicts a zoomed portion of a tri-dimensional protein model. Both, a loop and a β-strand in the 3-dimensional (3D) structure of the protein appear to share the same neighborhood, displaying phenylalanine, cysteine and histidine residues (F, C and H in the one-letter code, respectively).

[0026] FIG. 9(B) shows the type of residue substitutions, namely F to C, H to C, and C to H, expected to allow the creation of a disulfide bond between two cysteines located in different portions of the protein. It is important to note that the sole replacement of phenylalanine by cysteine is not sufficient to form a disulfide bond due to the separating distance between replacing residues. Disulfide bonds bring rigidity to wobbling portions eventually permitting the protein to resist heating, i.e., thermostabilizing the protein.

[0027] FIG. 10(A) depicts a zoomed portion of a tri-dimensional protein model. An α-helix and a loop are linked by both a hydrogen bond and a salt bridge (dotted lines) formed between serine-histidine (S and H in the one-letter code), and arginine-glutamate residues (R and E in the one-letter code), respectively.

[0028] FIG. 10(B) shows an example of the kind of residue substitutions, namely E to A, and H to A, expected to interfere with the formation of both the hydrogen bond and the salt bridge illustrated in FIG. 10A. The lack of this linking interaction would lead to a local wobbling of protein portions, which would increase exposure of otherwise less exposed epitopes.

[0029] FIG. 11 shows a tri-dimensional model of an amphipathic polypeptide: human β-defensin (PDB code 1IJV). Its amphipathic nature is defined by the presence of two different faces in a molecule (separated by a dotted line) composed of hydrophobic and cationic (positively charged) amino acids, respectively. The positive charges of the cationic face in these amphipathic peptides are functionally important and are mainly due to arginine and/or lysine residues.

[0030] FIG. 12 illustrates the two-dimensional (2D) matrix representation of a protein sequence, wherein the vertical axis represents the amino acid present at the corresponding position indicated on the horizontal axis and the horizontal axis represents the amino acid position along the length protein sequence (such that the first cell corresponds to amino acid position No. 1, the second cell to amino acid position No. 2, etc.). The matrix always contains 20 cells in one direction (the amino acid type) and a variable number of position-cells depending on the size of the protein, the number of position-cells equaling the number of amino acids in the protein sequence. An exemplary protein sequence is shown above the matrix and within the matrix, such that those cells corresponding to the actual sequence of the protein are indicated with shaded squares.

[0031] FIG. 13(A) shows an amphipathic peptide in a 2D matrix representation, where residues in dark gray boxes and white lettering correspond to the amino acid sequence. The horizontal axis corresponds to the 37-residue sequence and the vertical axis includes the 20 amino acids in the one-letter code. A middle horizontal line separates uncharged and charged residues. The first step of one particular embodiment of the 2D-scanning methods provided herein to optimize the peptide traits also is schematized. In this particular embodiment, amino acids at all positions along the peptide sequence are sequentially replaced by either lysine or arginine residues in an attempt to further cationize and improve the amphipathic feature of the peptide. The outcome of the “Lys/Arg-scanning,” herein represented by the substitutions in the black box and white lettering, is a collection of molecules including the optimized number and positions of positive charges.

[0032] FIG. 13(B) depicts of the hypothetical combined LEADs (in light gray boxes and black lettering) resulting from the “Lys/Arg-scanning” of the peptide sequence in FIG. 13A.

[0033] FIG. 13(C) shows the next step in the 2D-scanning methods used herein to optimize the activity of the amphipathic peptide sequence in FIG. 13A. A systematic analysis corresponding to a first in silico PAM250-based analysis followed by in vitro synthesis and testing of the mutant molecules is undertaken involving each of the uncharged residues LEAD candidates (shown in black boxes and white lettering), which neighbor the previously obtained LEADs (shown in light gray boxes and black lettering).

[0034] FIG. 13(D) represents a hypothetical optimized amphipathic peptide sequence (in light gray boxes and black lettering) corresponding to a “super-LEAD” sequence, resulting from K/R scanning and mutagenesis followed by 2D-scanning (FIGS. 13B through C).

[0035] FIG. 14 shows the methods provided herein for “multi-overlapped primer extensions” used for the rational combination of mutant LEADs. The method allows the simultaneous introduction of several mutations throughout a small protein/region of known sequence. Overlapping oligonucleotides of about 70 bases (since longer oligonucleotides lead to increased error) are designed from the DNA sequence (gene) of interest in such a way that they overlap with each other on a region of about 20 bases. These overlapping oligonucleotides (which can include point mutations) act as both template and primers in a first step of PCR (using a proofreading polymerase, e.g., Pfu DNA polymerase, to avoid unexpected mutations) to create small amounts of full-length gene. The full-length gene resulting from the first PCR then is selectively amplified in a second step of PCR using flanking primers, each one tagged with a restriction site in order to facilitate subsequent cloning. One multi-overlapped extension process yields a full-length (multi-mutated) molecule having multiple mutations therein.

### DETAILED DESCRIPTION

A. Definitions

[0036] Unless defined otherwise, all technical and scientific terms used herein have the same meaning as is commonly understood by one of skill in the art to which the invention(s) belong. All patents, patent applications, published applications and publications, Genbank sequences, websites and other published materials referred to throughout the entire disclosure herein, unless noted otherwise, are incorporated by reference in their entirety. In the event that there is a plurality of definitions for terms herein, those in this section prevail. Where reference is made to a URL or other such identifier or address, it understood that such identifiers can change and particular information on the internet can come and go, but equivalent information can be found by searching the internet and/or is publicly available. Reference thereto evidences the availability and public dissemination of such information.

[0037] As used herein, biological activity of a protein refers to any activity manifested by the protein in vivo.

[0038] As used herein, directed evolution refers to methods that “adapt” either natural proteins, synthetic proteins or protein domains to work in new or existing natural or artificial chemical or biological environments and/or to elicit new functions and/or to increase or decrease a given activity, and/or to modulate a given feature.

[0039] As used herein, two dimensional (2D) rational mutagenesis scanning (also referred to herein as 2D-scanning) refers to the process provided herein in which two dimensions of a particular protein sequence are scanned: (1) in one dimension specific amino acid residues along the protein sequence for replacement with different amino acids are identifed; these are referred to as is-HIT target positions; and (2) in the second dimension the amino acid type for replacing a particular is-HIT target is selected, these amino acids are referred to as the replacing or replacement amino acid(s).

[0040] As used herein, in silico refers to research and experiments performed using a computer. In silico methods include, but are not limited to, molecular modeling studies, and biomolecular docking experiments.

[0041] As used herein, “is-HIT” refers to an in silico identified amino acid position along a target protein sequence that has been identified based on i) the particular protein properties to be evolved, ii) the protein's amino acid sequence, and/or iii) the known properties of the individual amino acids. These is-HIT loci on the protein sequence are identified without use of experimental biological methods. For example, once the protein feature(s) to be optimized is (are) selected, diverse sources of information or previous knowledge (i.e., protein primary, secondary or tertiary structures, literature, patents) are exploited to determine those amino acid positions that may be amenable to improved protein fitness by replacement with a different amino acid. This step utilizes protein analysis “in silico.” All possible candidate amino acid positions along a target protein's primary sequence that might be involved in the feature being evolved are referred to herein as “in silico HITs” (“is-HITs”). The collection of all is-HITs identified during this step represents the first dimension (target residue position) of the two-dimensional scanning methods provided herein.

[0042] As used herein, “amenable to providing the evolved predetermined property or activity,” in the context of identifying is-HITs, refers to an amino acid position on a target protein, based on in silico analysis, to possess properties or features that when replaced would alter the activity being evolved.

[0043] As used herein, high-throughput screening (HTS) refers to processes that test a large number of samples, such as samples of test proteins or cells containing nucleic acids encoding the proteins of interest to identify structures of interest or the identify test compounds that interact with the variant proteins or cells containing them. HTS operations are amenable to automation and are typically computerized to handle sample preparation, assay procedures and the subsequent processing of large volumes of data.

[0044] As used herein, the term “restricted,” when used in the context of the identification of is-HIT amino acid positions along the protein sequence selected for amino acid replacement and/or the identification of replacing amino acids, means that fewer than all amino acids on the protein-backbone are selected for amino acid replacement; and/or fewer than all of the remaining 19 amino acids available to replace the original amino acid present in the unmodified starting protein are selected for replacement. In particular embodiments of the methods provided herein, the is-HIT amino acid positions are restricted, such that fewer than all amino acids on the protein-backbone are selected for amino acid replacement. In other embodiments, the replacing amino acids are restricted, such that fewer than all of the remaining 19 amino acids available to replace the native amino acid present in the unmodified starting protein are selected as replacing amino acids. In a particular embodiment, both of the scans to identify is-HIT amino acid positions and the replacing amino acids are restricted, such that fewer than all amino acids on the protein-backbone are selected for amino acid replacement and fewer than all of the remaining 19 amino acids available to replace the native amino acid are selected for replacement.

[0045] As used herein, “candidate LEADs,” are mutant proteins that are contemplated as potentially having an alteration in any attribute, chemical, physical or biological property in which such alteration is sought. In the methods herein, candidate LEADs are generally generated by systematically replacing is-HITS loci in a protein or a domain thereof with typically a restricted subset, or all, of the remaining 19 amino acids, such as obtained using PAM matrix analysis or other analysis. Candidate LEADs may be generated by other methods known to those of skill in the art tested by the high throughput methods herein (see FIG. 1B).

[0046] As used herein, “LEADs” are “candidate LEADs” whose activity has been demonstrated to be optimized or improved for the particular attribute, chemical, physical or biological property. For purposes herein a “LEAD” typically has activity with respect to the function of interest that differs by at least 10%, 20%, 30%, 40%, 50%, 60%, 70%, 80%, 90%, 100%, 150%, 200% or more from the unmodified and/or wild type (native) protein. In certain embodiments, the change in activity is at least about 10%, 20%, 30%, 40%, 50%, 60%, 70%, 80%, 90% or 100%, of the activity of the unmodified target protein. In other embodiments, the change in activity is not more than about 10%, 20%, 30%, 40%, 50%, 60%, 70%, 80%, 90% or 100%, of the activity of the unmodified target protein. In yet other embodiments, the change in activity is at least about 2 times, 3 times, 4 times, 5 times, 6 times, 7 times, 8 times, 9 times, 10 times, 20 times, 30 times, 40 times, 50 times, 60 times, 70 times, 80 times, 90 times, 100 times, 200 times, 300 times, 400 times, 500 times, 600 times, 700 times, 800 times, 900 times, 1000 times, or more greater than the activity of the unmodified target protein. The desired alteration, which can be either an increase or a reduction in activity, will depend upon the function or property of interest (e.g., ±10%, ±20%, etc.). The LEADs may be further optimized by replacement of a plurality (2 or more) of “is-HIT” target positions on the same protein molecule to generate “super-LEADs.”

[0047] As used herein, the term “super-LEAD” refers to protein mutants (variants) obtained by combining the single mutations present in two or more of the LEAD molecules into a single protein molecule (see FIG. 3A). Accordingly, in the context of the modified proteins provided herein, the phrase “proteins comprising one or more single amino acid replacements” encompasses any combination of two or more of the mutations described herein for a respective protein. For example, the modified proteins provided herein having one or more single amino acid replacements can have can have any combination of 2, 3, 4, 5, 6, 7, 8, 9, 10, 11, 12, 13, 14, 15, 16, 17, 18, 19, 20 or more of the amino acid replacements at the disclosed replacement positions. The collection of new super-LEAD mutant molecules is generated, tested and phenotypically characterized one-by-one in addressable arrays. Super-LEAD mutant molecules are such that each molecule contains a variable number and type of LEAD mutations. Those molecules displaying further improved fitness for the particular feature being evolved, are referred to as super-LEADs. Super-LEADs may be generated by other methods known to those of skill in the art and tested by the high throughput methods herein. For purposes herein a super-LEAD typically has activity with respect to the function of interest that differs from the improved activity of a LEAD by a desired amount, such as at least 10%, 20%, 30%, 40%, 50%, 60%, 70%, 80%, 90%, 100%, 150%, 200% or more from at least one of the LEAD mutants from which it is derived. In certain embodiments, the change in activity is at least about 10%, 20%, 30%, 40%, 50%, 60%, 70%, 80%, 90% or 100%, of the activity of the unmodified target protein. In other embodiments, the change in activity is not more than about 10%, 20%, 30%, 40%, 50%, 60%, 70%, 80%, 90% or 100%, of the activity of the unmodified target protein. In yet other embodiments, the change in activity is at least about 2 times, 3 times, 4 times, 5 times, 6 times, 7 times, 8 times, 9 times, 10 times, 20 times, 30 times, 40 times, 50 times, 60 times, 70 times, 80 times, 90 times, 100 times, 200 times, 300 times, 400 times, 500 times, 600 times, 700 times, 800 times, 900 times, 1000 times, or more greater than the activity of the unmodified target protein. As with LEADs, the change in the activity for super-LEADs is dependent upon the activity that is being “evolved.” The desired alteration, which can be either an increase or a reduction in activity, will depend upon the function or property of interest.

[0048] As used herein, an exposed residue presents more than 15% of its surface exposed to the solvent.

[0049] As used herein, the phrase “unmodified target protein,” “unmodified protein” or “unmodified cytokine,” or grammatical variations thereof, refers to a starting protein that is selected for optimization using the methods provided herein. The starting unmodified target protein can be the naturally occurring, wild type form of a protein. In addition, the starting unmodified target protein may have previously been altered or mutated, such that it differs from the native wild type isoform, but is nonetheless referred to herein as an starting unmodified target protein relative to the subsequently modified proteins produced herein. Thus, existing proteins known in the art that have previously been modified to have a desired increase or decrease in a particular biological activity compared to an unmodified reference protein can be selected and used herein as the starting “unmodified target protein.” For example, a protein that has been modified from its native form by one or more single amino acid changes and possesses either an increase or decrease in a desired activity, such as resistance to proteolysis, can be utilized with the methods provided herein as the starting unmodified target protein for further optimization of either the same or a different biological activity.

[0050] As used herein, the phrase “only one amino acid replacement occurs on each target protein” refers to the modification of a target protein, such that it differs from the unmodified form of the target protein by a single amino acid change. For example, in one embodiment, mutagenesis is performed by the replacement of a single amino acid residue at only one is-HIT target position on the protein backbone (e.g., “one-by-one” in addressable arrays), such that each individual mutant generated is the single product of each single mutagenesis reaction. The single amino acid replacement mutagenesis reactions are repeated for each of the replacing amino acids selected at each of the is-HIT target positions. Thus, a plurality of mutant protein molecules are produced, whereby each mutant protein contains a single amino acid replacement at only one of the is-HIT target positions.

[0051] As used herein, the phrase “pseudo-wild type” amino acids in the context of single or multiple amino acid replacements, are those amino acids that are different from the native amino acid at a given amino acid position but can replace the native one at that position without introducing any measurable change (typically a change less than 10%, 5% or 1%, depending upon the activcity) in a particular protein activity. A population of sets of nucleic acid molecules encoding a collection of mutant molecules can be generated and phenotypically characterized such that proteins with amino acid sequences different from the native ones but that still elicit the same level and type of desired activity as the native protein can be produced.

[0052] As used herein, biological and pharmacological activity includes any activity of a biological pharmaceutical agent and includes, but is not limited to, resistance to proteolysis, biological efficiency, transduction efficiency, gene/transgene expression, differential gene expression and induction activity, titer, progeny productivity, toxicity, cytotoxicity, immunogenicity, cell proliferation and/or differentiation activity, anti-viral activity, morphogenetic activity, teratogenetic activity, pathogenetic activity, therapeutic activity, tumor suppressor activity, ontogenetic activity, oncogenetic activity, enzymatic activity, pharmacological activity, cell/tissue tropism and delivery.

[0053] As used herein, “output signal” refers to parameters that can be followed over time and, if desired, quantified. For example, when a recombinant protein is introduced into a cell, the cell containing the recombinant protein undergoes a number of changes. Any such change that can be monitored and used to assess the transformation or transfection, is an output signal, and the cell is referred to as a reporter cell; the encoding nucleic acid is referred to as a reporter gene, and the construct that includes the encoding nucleic acid is a reporter construct. Output signals include, but are not limited to, enzyme activity, fluorescence, luminescence, amount of product produced and other such signals. Output signals include expression of a gene or gene product, including heterologous genes (transgenes) inserted into the plasmid virus. Output signals are a function of time (“t”) and are related to the amount of protein used in the composition. For higher concentrations of protein, the output signal may be higher or lower. For any particular concentration, the output signal increases as a function of time until a plateau is reached. Output signals may also measure the interaction between cells, expressing heterologous genes, and biological agents.

[0054] As used herein, the activity of an IFNα-2b protein refers to any biological activity that can be assessed. In particular, herein, the activity assessed for the IFNα-2b proteins is resistance to proteolysis, antiviral activity and cell proliferation activity.

[0055] As used herein, the Hill equation is a mathematical model that relates the concentration of a drug (i.e., test compound or substa nce) to the response measured

$$y = \frac{{{y}_{max} [ D ]}^{n}}{{[ D ]}^{n} + {[ {D}_{50} ]}^{n}} ,$$

where y is the variable measured, such as a response or signal, Yₘₐₓ is the maximal response achievable, [D] is the molar concentration of a drug, [D₅₀] is the concentration that produces a 50% maximal response to the drug, n is the slope parameter, which is 1 if the drug binds to a single site and with no cooperativity between or among sites. A Hill plot is log₁₀ of the ratio of ligand-occupied receptor to free receptor vs. log [D] (M). The slope is n, where a slope of greater than 1 indicates cooperativity among binding sites, and a slope of less than 1 can indicate heterogeneity of binding. This general equation has been employed for assessing interactions in complex biological systems (see, published International PCT application No. WO 01/44809 based on PCT No. PCT/FR00/03503, see, also, the EXAMPLES).

[0056] As used herein, in the Hill-based analysis (see, published International PCT application No. WO 01/44809 based on PCT No. PCT/FR00/03503), the parameters, π,κ,τ,ε,η,θ, are as follows:

[0057] π is the potency of the biological agent acting on the assay (cell-based) system;

[0058] κ is the constant of resistance of the assay system to elicit a response to a biological agent;

[0059] ε is the global efficiency of the process or reaction triggered by the biological agent on the assay system;

[0060] τ is the apparent titer of the biological agent;

[0061] θ is the absolute titer of the biological agent; and

[0062] η is the heterogeneity of the biological process or reaction.

[0063] In particular, as used herein, the parameters π (potency) or κ (constant of resistance) are used to respectively assess the potency of a test agent to produce a response in an assay system and the resistance of the assay system to respond to the agent.

[0064] As used herein, ε (efficiency), is the slope at the inflexion point of the Hill curve (or, in general, of any other sigmoidal or linear approximation), to assess the efficiency of the global reaction (the biological agent and the assay system taken together) to elicit the biological or pharmacological response.

[0065] As used herein, τ (apparent titer) is used to measure the limiting dilution or the apparent titer of the biological agent.

[0066] As used herein, θ (absolute titer), is used to measure the absolute limiting dilution or titer of the biological agent.

[0067] As used herein, η (heterogeneity) measures the existence of discontinuous phases along the global reaction, which is reflected by an abrupt change in the value of the Hill coefficient or in the constant of resistance.

[0068] As used herein, a population of sets of nucleic acid molecules encoding a collection of mutants refers to a collection of plasmids or other vehicles that carrying (encoding) the gene variants, such that individual plasmid or other vehicles carry individual gene variants. Each element of the collection (library) is physically separated from the others, individually set in an appropriate format, such asn addressable array, and is generated as a single product of an independent mutagenesis reaction. When a collection of proteins is contemplated, it will be so-stated.

[0069] As used herein, a “reporter cell” is the cell that “reports,” i.e., undergoes the change, in response to the treatment with for example a protein or a virus.

[0070] As used herein, “reporter” or “reporter moiety” refers to any moiety that allows for the detection of a molecule of interest, such as a protein expressed by a cell. Reporter moieties include, but are not limited to, for example, fluorescent proteins, such as red, blue and green fluorescent proteins; LacZ and other detectable proteins and gene products. For expression in cells, nucleic acid encoding the reporter moiety can be expressed as a fusion protein with a protein of interest or under to the control of a promoter of interest.

[0071] As used herein, phenotype refers to the physical, physiological or other manifestation of a genotype (a sequence of a gene). In methods herein, phenotypes that result from alteration of a genotype are assessed.

[0072] As used herein, “activity” means in the largest sense of the term any change in a system (either biological, chemical or physical system) of any nature (such as changes in the amount of product in an enzymatic reaction, changes in cell proliferation, in immunogenicity or in toxicity) caused by a protein or protein mutant interacting with that system. In addition, the term “activity,” “higher activity” or “lower activity” as used herein in reference to resistance to either proteases, proteolysis, incubation with serum or with blood, means the ratio or residual biological (antiviral) activity between “after” protease/blood or serum treatment and “before” protease/blood or serum treatment.

[0073] As used herein, activity refers to the function or property to be evolved. An active site refers to a site(s) responsible or that participates in conferring the activity or function. The activity or active site evolved (the function or property and the site conferring or participating in conferring the activity) may have nothing to do with natural activities of a protein. For example, it could be an ‘active site’ for conferring immunogenicity (immunogenic sites or epitopes) on a protein.

[0074] As used herein, the amino acids, which occur in the various amino acid sequences appearing herein, are identified according to their known, three-letter or one-letter abbreviations (see, Table 1). The nucleotides, which occur in the various nucleic acid fragments, are designated with the standard single-letter designations used routinely in the art.

[0075] As used herein, amino acid residue refers to an amino acid formed upon chemical digestion (hydrolysis) of a polypeptide at its peptide linkages. The amino acid residues described herein are presumed to be in the “L” isomeric form. Residues in the “D” isomeric form, which are so-designated, can be substituted for any L-amino acid residue, as long as the desired functional property is retained by the polypeptide. NH₂ refers to the free amino group present at the amino terminus of a polypeptide. COOH refers to the free carboxy group present at the carboxyl terminus of a polypeptide. In keeping with standard polypeptide nomenclature described in J. Biol. Chem., 243:3552-3559, 1969, and adopted at 37 C.F.R. §§1.821-1.822, abbreviations for amino acid residues are shown in Table 1:

TABLE 1
Table of Correspondence

SYMBOL

| 1-Letter | 3-Letter | AMINO ACID |
|---|---|---|
| Y | Tyr | tyrosine |
| G | Gly | glycine |
| F | Phe | phenylalanine |
| M | Met | methionine |
| A | Ala | alanine |
| S | Ser | serine |
| I | Ile | isoleucine |
| L | Leu | leucine |
| T | Thr | threonine |
| V | Val | valine |
| P | Pro | proline |
| K | Lys | lysine |
| H | His | histidine |
| Q | Gln | glutamine |
| E | Glu | glutamic acid |
| Z | Glx | Glu and/or Gln |
| W | Trp | tryptophan |
| R | Arg | arginine |
| D | Asp | aspartic acid |
| N | Asn | asparagine |
| B | Asx | Asn and/or Asp |
| C | Cys | cysteine |
| X | Xaa | Unknown or other |

[0076] It should be noted that all amino acid residue sequences represented herein by formulae have a left to right orientation in the conventional direction of amino-terminus to carboxyl-terminus. In addition, the phrase “amino acid residue” is broadly defined to include the amino acids listed in the Table of Correspondence (Table 1) and modified and unusual amino acids, such as those referred to in 37 C.F.R. §§ 1.821-1.822, and incorporated herein by reference. Furthermore, it should be noted that a dash at the beginning or end of an amino acid residue sequence indicates a peptide bond to a further sequence of one or more amino acid residues or to an amino-terminal group such as NH₂ or to a carboxyl-terminal group such as COOH.

[0077] As used herein, nucleic acids include DNA, RNA and analogs thereof, including protein nucleic acids (PNA) and mixture thereof. Nucleic acids can be single or double stranded. When referring to probes or primers, optionally labeled, with a detectable label, such as a fluorescent or radiolabel, single-stranded molecules are contemplated. Such molecules are typically of a length such that they are statistically unique of low copy number (typically less than 5, generally less than 3) for probing or priming a library. Generally a probe or primer contains at least 14, 16 or 30 contiguous of sequence complementary to or identical a gene of interest. Probes and primers can be 10, 14, 16, 20, 30, 50, 100 or more nucleic acid bases long.

[0078] Therefore, as used herein, the term “identity” represents a comparison between a test and a reference polypeptide or polynucleotide. For example, a test polypeptide may be defined as any polypeptide that is 90% or more identical to a reference polypeptide.

[0079] As used herein, the term at least “90% identical to” refers to percent identities from 90 to 100% relative to the reference polypeptides. Identity at a level of 90% or more is indicative of the fact that, assuming for exemplification purposes a test and reference polypeptide length of 100 amino acids are compared. No more than 10% (i.e., 10 out of 100) amino acids in the test polypeptide differ from that of the reference polypeptides. Similar comparisons may be made between a test and reference polynucleotides. Such differences may be represented as point mutations randomly distributed over the entire length of an amino acid sequence or they may be clustered in one or more locations of varying length up to the maximum allowable, e.g., 10/100 amino acid difference (approximately 90% identity). Differences are defined as nucleic acid or amino acid substitutions, or deletions.

[0080] As used herein, it also is understood that the terms substantially identical or similar varies with the context as understood by those skilled in the relevant art.

[0081] As used herein, a substantial change in an activity of a protein is dependent upon the activity assessed and is any that one of skill in the art would identify as not being the same activity. The same level activity is an activity that is within experimental error or expected variation for the activity.

[0082] As used herein, a therapeutically effective dose refers to that amount of the compound sufficient to result in amelioration of symptoms of disease.

[0083] A cell extract that contains the DNA or protein of interest should be understood to mean a homogenate preparation or cell-free preparation obtained from cells that express the protein or contain the DNA of interest. The term “cell extract” is intended to include culture media, especially spent culture media from which the cells have been removed.

[0084] As used herein, receptor refers to a biologically active molecule that specifically binds to (or with) other molecules. The term “receptor protein” may be used to more specifically indicate the proteinaceous nature of a specific receptor.

[0085] As used herein, recombinant refers to any progeny formed as the result of genetic engineering.

[0086] As used herein, a promoter region refers to the portion of DNA of a gene that controls transcription of the DNA to which it is operatively linked. The promoter region includes specific sequences of DNA that are sufficient for RNA polymerase recognition, binding and transcription initiation. This portion of the promoter region is referred to as the promoter. In addition, the promoter region includes sequences that modulate this recognition, binding and transcription initiation activity of the RNA polymerase. These sequences may be cis acting or may be responsive to trans acting factors. Promoters, depending upon the nature of the regulation, may be constitutive or regulated.

[0087] As used herein, the phrase “operatively linked” generally means the sequences or segments have been covalently joined into one piece of DNA, whether in single or double stranded form, whereby control or regulatory sequences on one segment control or permit expression or replication or other such control of other segments. The two segments are not necessarily contiguous. For gene expression a DNA sequence and a regulatory sequence(s) are connected in such a way to control or permit gene expression when the appropriate molecular, e.g., transcriptional activator proteins, are bound to the regulatory sequence(s).

[0088] As used herein, production by recombinant means by using recombinant DNA methods means the use of the well known methods of molecular biology for expressing proteins encoded by cloned DNA, including cloning expression of genes and methods, such as gene shuffling and phage display with screening for desired specificities.

[0089] As used herein, a composition refers to any mixture of two or more products or compounds. It may be a solution, a suspension, liquid, powder, a paste, aqueous, non-aqueous or any combination thereof.

[0090] As used herein, a combination refers to any association between two or more items.

[0091] As used herein, substantially identical to a product means sufficiently similar so that the property of interest is sufficiently unchanged so that the substantially identical product can be used in place of the product.

[0092] As used herein, the term “vector” refers to a nucleic acid molecule capable of transporting another nucleic acid to which it has been linked. One type of vector is an episome, i.e., a nucleic acid capable of extra-chromosomal replication. Exemplary vectors are those capable of autonomous replication and/or expression of nucleic acids to which they are linked. Vectors capable of directing the expression of genes to which they are operatively linked are referred to herein as “expression vectors.” In general, expression vectors of utility in recombinant DNA techniques are often in the form of “plasmids” which refer generally to circular double stranded DNA loops which, in their vector form are not bound to the chromosome. “Plasmid” and “vector” are used interchangeably as the plasmid is the most commonly used form of vector. Other such other forms of expression vectors that serve equivalent functions and that become known in the art subsequently hereto.

[0093] As used herein, vector also is used interchangeable with “virus vector” or “viral vector.” In this case, which will be clear from the context, the “vector” is not self-replicating. Viral vectors are engineered viruses that are operatively linked to exogenous genes to transfer (as vehicles or shuttles) the exogenous genes into cells.

[0094] As used herein, transduction refers to the process of gene transfer and expression into mammalian and other cells mediated by viruses. Transfection refers to the process when mediated by plasmids.

[0095] As used herein, transformation refers to the process of gene transfer and expression into bacterial cells, mediated by plasmids.

[0096] As used herein, “allele,” which is used interchangeably herein with “allelic variant” refers to alternative forms of a gene or portions thereof. Alleles occupy the same locus or position on homologous chromosomes. When a subject has two identical alleles of a gene, the subject is said to be homozygous for the gene or allele. When a subject has two different alleles of a gene, the subject is said to be heterozygous for the gene. Alleles of a specific gene can differ from each other in a single nucleotide, or several nucleotides, and can include substitutions, deletions, and insertions of nucleotides. An allele of a gene also can be a form of a gene containing a mutation.

[0097] As used herein, the term “gene” or “recombinant gene” refers to a nucleic acid molecule comprising an open reading frame and including at least one exon and (optionally) an intron sequence. A gene can be either RNA or DNA. Genes may include regions preceding and following the coding region (leader and trailer).

[0098] As used herein, “intron” refers to a DNA sequence present in a given gene which is spliced out during mRNA maturation.

[0099] As used herein, “nucleotide sequence complementary to the nucleotide sequence set forth in SEQ ID NO:” refers to the nucleotide sequence of the complementary strand of a nucleic acid strand having the particular SEQ ID NO:. The term “complementary strand” is used herein interchangeably with the term “complement.” The complement of a nucleic acid strand can be the complement of a coding strand or the complement of a non-coding strand. When referring to double stranded nucleic acids, the complement of a nucleic acid having a particular SEQ ID NO: refers to the complementary strand of the strand set forth in the particular SEQ ID NO: or to any nucleic acid having the nucleotide sequence of the complementary strand of the particular SEQ ID NO:. When referring to a single stranded nucleic acid having a nucleotide sequence corresponding to a particular SEQ ID NO:, the complement of this nucleic acid is a nucleic acid having a nucleotide sequence which is complementary to that of the particular SEQ ID NO:.

[0100] As used herein, the term “coding sequence” refers to that portion of a gene that encodes an amino acid sequence of a protein.

[0101] As used herein, the term “sense strand” refers to that strand of a double-stranded nucleic acid molecule that has the sequence of the mRNA that encodes the amino acid sequence encoded by the double-stranded nucleic acid molecule.

[0102] As used herein, the term “antisense strand” refers to that strand of a double-stranded nucleic acid molecule that is the complement of the sequence of the mRNA that encodes the amino acid sequence encoded by the double-stranded nucleic acid molecule.

[0103] As used herein, an array refers to a collection of elements, such as nucleic acid molecules, containing three or more members. An addressable array is one in which the members of the array are identifiable, typically by position on a solid phase support or by virtue of an identifiable or detectable label, such as by color, fluorescence, electronic signal (i.e., RF, microwave or other frequency that does not substantially alter the interaction of the molecules of interest), bar code or other symbology, chemical or other such label. In certain embodiments, the members of the array are immobilized to discrete identifiable loci on the surface of a solid phase or directly or indirectly linked to or otherwise associated with the identifiable label, such as affixed to a microsphere or other particulate support (herein referred to as beads) and suspended in solution or spread out on a surface.

[0104] As used herein, a library of molecules is a collection of molecules; the terms are used interchangeably.

[0105] As used herein, a support (also referred to as a matrix support, a matrix, an insoluble support or solid support) refers to any solid or semisolid or insoluble support to which a molecule of interest, typically a biological molecule, organic molecule or biospecific ligand is linked or contacted. Such materials include any materials that are used as affinity matrices or supports for chemical and biological molecule syntheses and analyses, such as, but are not limited to: polystyrene, polycarbonate, polypropylene, nylon, glass, dextran, chitin, sand, pumice, agarose, polysaccharides, dendrimers, buckyballs, polyacryl-amide, silicon, rubber, and other materials used as supports for solid phase syntheses, affinity separations and purifications, hybridization reactions, immunoassays and other such applications. The matrix herein can be particulate or can be in the form of a continuous surface, such as a microtiter dish or well, a glass slide, a silicon chip, a nitrocellulose sheet, nylon mesh, or other such materials. When particulate, typically the particles have at least one dimension in the 5-10 mm range or smaller. Such particles, referred collectively herein as “beads,” are often, but not necessarily, spherical. Such reference, however, does not constrain the geometry of the matrix, which may be any shape, including random shapes, needles, fibers, and elongated. Roughly spherical “beads,” particularly microspheres that can be used in the liquid phase, also are contemplated. The “beads” may include additional components, such as magnetic or paramagnetic particles (see, e.g., Dynabeads (Dynal, Oslo, Norway)) for separation using magnets, as long as the additional components do not interfere with the methods and analyses herein.

[0106] As used herein, a matrix or support particles refers to matrix materials that are in the form of discrete particles. The particles have any shape and dimensions, but typically have at least one dimension that is 100 mm or less, 50 mm or less, 10 mm or less, 1 mm or less, 100 μm or less, 50μm or less and typically have a size that is 100 mm³ or less, 50 mm³ or less, 10 mm³ or less, and 1 mm³ or less, 100 μm³ or less and may be order of cubic microns. Such particles are collectively called “beads.”

[0107] As used herein, the abbreviations for any protective groups, amino acids and other compounds, are, unless indicated otherwise, in accord with their common usage, recognized abbreviations, or the IUPAC-IUB Commission on Biochemical Nomenclature (see, Biochem., 11:942-944, 1972).

B. Directed Evolution

[0108] To date, there have been three general approaches described for protein directed evolution based on mutagenesis.

[0109] 1) Pure Random Mutagenesis

[0110] Random mutagenesis methodology requires that the amino acids in the starting protein sequence are replaced by all (or a group) of the 20 amino acids. Either single or multiple replacements at different amino acid positions are generated on the same molecule, at the same time. The random mutagenesis method relies on a direct search for fitness improvement based on random amino acid replacement and sequence changes at multiple amino acid positions. In this approach neither the amino acid position (first dimension) nor the amino acid type (second dimension) are restricted; and everything possible is generated and tested. Multiple replacements can randomly happen at the same time on the same molecule. For example, random mutagenesis methods are widely used to develop antibodies with higher affinity for its ligand, by the generation of random-sequence libraries of antibody molecules, followed by expression and screening using filamentous phages.

[0111] 2) Restricted Random Mutagenesis

[0112] Restricted random mutagenesis methods introduce either all of the 20 amino acids or DNA-biased residues, wherein the bias is based on the sequence of the DNA and not on that of the protein, in a stochastic or semi-stochastic manner, respectively, within restricted or predefined regions of the protein, known in advance to be involved in the biological activity being “evolved.” This method relies on a direct search for fitness improvement based on random amino acid replacement and sequence changes at either restricted or multiple amino acid positions, with the hope that a new, unpredictable amino acid sequence at specific regions would perform better than the starting sequence. In this approach the scanning can be restricted to selected amino acid positions and/or amino acid types, while material changes continue to be random in position and type. For example, the amino acid position can be restricted by prior selection of the target region to be mutated (selection of target region is based upon prior knowledge on protein structure/function); while the amino acid type is not primarily restricted as replacing amino acids are stochastically or at most “semi-stochastically” chosen. As an example, this method is used to optimize known binding sites on proteins, including hormone-receptor systems and antibody-epitope systems.

[0113] 3) Non-restricted Rational mutagenesis

[0114] Rational mutagenesis is a two-step process and is described in co-pending U.S. application Ser. No. 10/022,249. Briefly, the first step requires amino acid scanning where all and each of the amino acids in the starting protein sequence are replaced by a third amino acid of reference (e.g., alanine). Only a single amino acid is replaced on each protein molecule at a time; while a collection of protein molecules having a single amino acid replacement is generated such that molecules are differentiated by the amino acid position at which the replacement has taken place. Mutant DNA molecules are designed, generated by mutagenesis and cloned individually, such as in addressable arrays, such that they are physically separated from each other and that each one is the single product of an independent mutagenesis reaction. Mutant protein molecules derived from the collection of mutant DNA molecules also are physically separated from each other, such as by formatting in addressable arrays.

[0115] Activity assessment on each protein molecule allows for the identification of those amino acid positions that result in a drop in activity when replaced, thus indicating the involvement of that particular amino acid position in the protein's biological activity and/or conformation that leads to fitness of the particular feature being evolved. Those amino acid positions are referred to as HITs. At the second step, a new collection of molecules is generated such that each molecule differs from each other by the amino acid present at the individual HIT positions identified in step 1. All 20 amino acids (19 amino acids and the original) are introduced at each of the HIT positions identified in step 1; while each individual molecule contains, in principle, one and only one amino acid replacement. Mutant DNA molecules are designed, generated by mutagenesis and cloned individually, such as in addressable arrays, such that they are physically separated from each other and that each one is the single product of an independent mutagenesis reaction. Mutant protein molecules derived from the collection of mutant DNA molecules also are physically separated from each other and can be formatted in addressable arrays.

[0116] Activity assessment then is individually performed on each individual mutant molecule. The newly generated sequences that lead to an improvement in the protein activity are referred to as LEADs (FIG. 2). This method permits an indirect search for activity improvement based on one rational amino acid replacement and sequence change at single amino acid positions at a time, in search of a new, unpredictable amino acid sequence at some unpredictable regions along the protein that performs better than the starting sequence.

[0117] In this approach neither the amino acid position nor the replacing amino acid type are restricted. Full length protein scanning is performed during the first step to identify HIT positions, and then all 20 amino acids are tested at each of the HIT positions, to identify LEAD sequences; while, as a starting point, only one amino acid at a time is replaced on each molecule. The selection of the target region (HITs and surrounding amino acids) for the second step is based upon experimental data on activity obtained in the first step. Thus, no prior knowledge of protein structure and/or function is necessary. Using this approach, LEAD sequences have been found on proteins that are located at regions of the protein not previously known to be involved in the particular biological activity being optimized; thus emphasizing the power of this approach to discover unpredictable regions (HITs) as targets for fitness improvement.

C. 2-Dimensional Scanning

[0118] Provided herein are 2-Dimensional rational scanning (or “2D-scanning”) methods for protein rational evolution that are based on scanning over two dimensions: (1) one dimension is the amino acid position along the protein sequence to identify is-HIT target positions, and (2) the second dimension is the amino acid type selected for replacing the particular is-HIT amino acid position.

[0119] In particular embodiments, based on i) the particular protein properties to be evolved, ii) the protein's amino acid sequence, and iii) the known properties of the individual amino acids, a number of target positions along the protein sequence are selected, in silico, “as is-HIT target positions.” This number of is-HIT target positions is as large as possible such that all reasonably possible target positions for the particular feature being evolved are included. In particular, embodiments where a restricted number of is-HIT target positions are selected for replacement, the amino acids selected to replace the is-HIT target positions on the particular protein being optimized can be either all of the remaining 19 amino acids or, more frequently, a more restricted group comprising selected amino acids that are contemplated to have the desired effect on protein activity. In another embodiment, so long as a restricted number of replacement amino acids are used, all of the amino acid positions along the protein backbone can be selected as is-HIT target positions for amino acid replacement.

[0120] Mutagenesis then is performed by the replacement of single amino acid residues at specific is-HIT target positions on the protein backbone (e.g., “one-by-one” in addressable arrays), such that each individual mutant generated is the single product of each single mutagenesis reaction. Mutant DNA molecules are designed, generated by mutagenesis and cloned individually, in addressable arrays, such that they are physically separated from each other and that each one is the single product of an independent mutagenesis reaction. Mutant protein molecules derived from the collection of mutant DNA molecules also are physically separated from each other and can be formatted in addressable arrays. Thus, a plurality of mutant protein molecules are produced, whereby each mutant protein contains a single amino acid replacement at only one of the is-HIT target positions. Activity assessment then is individually performed on each individual protein mutant molecule, following protein expression and measurement of the appropriate activity, such as set forth in the Examples provided herein for optimization of IFNα-2b. The newly generated sequences that lead to an improvement in the protein activity are referred to as LEADs. This method relies on an indirect search for protein improvement for a particular activity, such as increased resistance to proteolysis, based on a rational amino acid replacement and sequence change at single or, in another embodiment, a limited number of amino acid positions at a time. As a result, optimized proteins having newly discovered amino acid sequences at some regions along the protein that perform better than the starting sequence are identified and isolated.

[0121] A variety of protein properties and/or biological activities can be modified using the rational mutagenesis methods provided herein, such as an increase or decrease in protein stability, the optimal pH or pH-activity of a protein, protein digestibility, protein thermostablization, protein antigenicity, the amphipathic properties of a protein, ligand-receptor interactions of a protein.

[0122] An advantage of the 2D-scanning methods provided herein is that at least one, and typically both, of the two dimensions for scanning (amino acid position and the replacing amino acid) are restricted. This means that fewer than all amino acids on the protein-backbone are selected for amino acid replacement; and/or fewer than all of the remaining 19 amino acids available to replace the original, such as native, amino acid are selected for replacement. The 2D-scanning methods provided herein are not limited to a restrictive number of selected target amino acid positions; instead the entire length of the protein is “scanned” or checked, in silico, to identify candidate amino acid positions amenable to improving the desired activity, wherein these positions are designated “in silico HITs” (“is-HITs”). Each possible amino acid and amino acid position that might be involved in the feature being evolved is identified and referred to herein as “is-HITs.” The methods provided herein are not limited to only those amino acid positions that would be the preferred candidates based on either existing algorithms, previous knowledge or intuition (this would be purely predictive). Neither do the methods provided herein replace every amino acid position along the protein (this would be purely random or stochastic). Once all the candidate amino acid positions (is-HITs) are identified, the next step involves identifying the amino acids that will be used to replace them at the respective is-HITs in the natural unmodified sequence.

[0123] Each possible amino acid that can be used as a replacing amino acid in order to evolve the selected feature while, at the same time, not having a deleterious effect on either activity or structure, is identified. The methods provided herein are not limited to a restrictive number of preferred replacing amino acids; instead all possible replacing amino acids are “tested” for each possible target position, or said the other way around, each is-HIT position is “scanned” for all possible candidate replacing amino acids. The methods are not restricted to only those amino acids that would be the preferred candidates based on existing algorithms, knowledge or intuition (this would be purely predictive). Neither do the methods provided herein replace every one of the remaining 19 amino acids as replacing amino acids (this would be purely random or stochastic).

[0124] To compare the 2D-scanning methods provided herein to the “Pure Random Mutagenesis,” “Restricted Random Mutagenesis” and “Rational Mutagenesis” methods described above, the following example in which enzyme activity at a pH different from the optimal pH for the native protein is improved is considered. The object is to identify mutants in which specific amino acid replacement(s) lead to a shift in the pH profile of the enzyme.

[0125] The “pure random mutagenesis” approach would proceed by blinded random (stochastic) amino acid replacement at any place on the protein sequence, whether the protein 3-dimensional structure is known or not. The “restricted random mutagenesis” approach, however, in the absence of knowledge about the 3-dimensional structure. Where where the 3-dimensional structure of the protein is known, this method joins and becomes a sort of “pure random mutagenesis” approach.

[0126] In a rational mutagenesis” approach, an amino acid-scanning step would be performed, in order to identify those amino acid positions (HITs) that would be involved in the determination of the optimal pH. As the outcome of the second step, suitable amino acids would have been identified such that when put at the HIT positions lead to a change in optimal pH.

[0127] In the example of the enzyme pH activity profile, in practicing the “2D-scanning” methods provided those amino acid positions (the “is-HITs”) that may either affect optimal pH or are otherwise related to pH-activity are identified. This is done solely based on the primary amino acid sequence. In the example, the is-HITs will, in principle, be located at every position along the protein sequence where there is an amino acid susceptible to be either proton donor or proton acceptor. Each and every one of those amino acids is considered potentially involved in the determination of the optimal pH. No other assumptions are made. These is-HITs are chosen independently from any assumptions based on protein structure; the choice, in the example, is based only on intrinsic properties of the individual amino acids. These amino acids positions (target positions) are taken to the next step in the process as is-HITs.

[0128] At the second step, a collection of physical (i.e., this step is not “in silico”) “candidate LEAD” mutant molecules is generated such that each candidate LEAD molecule differs from each other by the amino acid present at one or more is-HIT positions. In certain embodiments, all 20 amino acids may be introduced at each of the is-HIT positions; while each individual molecule contains, in principle, either only one or a few amino acid replacements at different is-HIT positions. In another embodiment, only a restricted group of amino acids could be used to replace the original amino acids at the is-HIT positions. These replacing amino acids are chosen based on their intrinsic properties: i.e., in our example of the optimal pH, the subset of replacing amino acids would be restricted to only those amino acids able to function as either a proton donor or a proton receptor.

[0129] The 2D rational scanning methods provided herein still maintain the value of performing a “blinded” screening, that is observed in the other three approaches; although it is more conditioned by previous knowledge of amino acid properties, in the sense that it relies on a higher number of assumptions and hypotheses. This effect is partially countered by the fact that as many alternative is-HIT positions as possible, identified based on different criteria (helix-turn disruption, hydrophobicity, and other parameters), are covered. On the other hand, the number of different replacing amino acids is kept as large as reasonably possible, up to all the 20 amino acids (at each position), whenever appropriate. Despite of the restrictions introduced by the rational assumptions made in the choice of is-HIT target positions and of the replacing amino acids, because the selection of both is-HIT target positions and replacing amino acids is limited to a minimum (keeping the number of is-HIT as large as possible) and the replacing amino acid type as broad as possible, the 2D-scanning method provided herein is extremely rich in its potential for exploring unexpected and innovative amino acid sequences, while at the same time, being highly efficient in terms of attrition rate between mutants generated and LEAD molecules obtained. Given the number of different candidate LEAD protein molecules that are generated (e.g., a few thousands per collection), a high-throughput screening is typically necessary.

1) Identifying In-silico HITs

[0130] Provided herein is a method for directed evolution that includes identifying and selecting (using in silico analysis) specific amino acids and amino acid positions (referred to herein as is-HITs; see, e.g., FIG. 1A) along the residues in a protein that are contemplated to be directly or indirectly involved in a feature being evolved. The 2D-scanning methods provided herein use the following two-steps. The first step is an in silico search on the particular protein's amino acid sequence to identify all possible amino acid positions that can potentially be targets for the activity being evolved. This is effected, for example, by assessing the effect of amino acid residues on the property or properties to be altered on the protein, using standard software. The particulars of the in silico analysis is a function of the property to be modified. For example, as provided herein, the property improved is the resistance of a protein to proteolysis. To determine amino acid residues that are potential targets as is-HITs, in this example, all possible target residues for proteases are first identified. The 3-dimensional structure of the protein is the considered in order to identify surface residues. Comparison of exposed residues with proteolytically cleavable residues yields residues that are targets for change.

[0131] Once identified, these amino acid positions or target sequences are referred to as “is-HITs” (in silico HITs; FIG. 1A). In silico HITs are defined as those amino acid positions (or target positions) that potentially are involved in the “evolving” feature, such as increased resistance to proteolysis. In one embodiment, the discrimination of the is-HITs among all the amino acid positions in a protein sequence is made based on i) the amino acid type at each position in addition to, whenever available but not necessarily, ii) the information on the protein secondary or tertiary structure. In silico HITs constitute a collection of mutant molecules such that all possible amino acids, amino acid positions or target sequences potentially involved in the evolving feature are represented. No strong theoretical discrimination among amino acids or amino acid positions is made at this stage.

[0132] In silico HIT positions are spread over the full length of a protein sequence. In one embodiment, only one single is-HIT amino acid at a time is replaced on the target protein. In another embodiment, a limited number of is-HIT amino acids are replaced at the same time on the same target protein molecule. The selection of target regions (is-HITs and surrounding amino acids) for the second step is based upon rational assumptions and predictions. No prior knowledge of protein structure/function is necessary. In some embodiments, the use of the 2D-scanning methodology provided herein does not necessarily require any previous knowledge of the 3-dimensional conformational structure of the protein.

[0133] Any protein known or otherwise available to those of skill in the art is suitable for optimization using the directed evolution methods provided herein, including cytokines (e.g., IFNα-2b) or any other proteins that have already been mutated or optimized.

[0134] A variety of parameters can be analyzed to determine whether or not a particular amino acid on a protein might be involved in the evolving feature. For example, the information provided by crystal structures of proteins can be rationally exploited in order to perform a computer-assisted (in silico) analysis towards the prediction of variants with desired features. In a particular embodiment, a limited number of initial premises (typically no more than 2) are used to determine the in silico HITS. In other embodiments, the number of premises used to determine the in silico HITs can range from 1 to 10 premises, including no more than 9, no more than 8, no more than 7, no more than 6, no more than 5, no more than 4, no more than 3, but are typically no more than 2 premises. It is important to the methods provided herein that the number of initial premises be kept to a minimum, so as to maintain the number of potential is-HITs at a maximum (here is where the methods provided are not limited by too much prediction based on theoretical assumptions). When two premises are employed, the first condition is typically the amino acid type itself, which is directly linked to the nature of the evolving feature. For example, if the goal were to change the optimum pH for an enzyme, then the replacing-amino acids selected at this step for the replacement of original sequence would be only those with a certain pKa value. The second premise is typically related to the specific position of those amino acids along the protein structure. For example, some amino acids might be discarded if they are not expected to be exposed enough to the solvent, even when they might have appropriate pKa values.

[0135] During the first step of identification of is-HITs according to the methods provided herein, each individual amino acid along the protein sequence is considered individually to assess whether it is a candidate for is-HIT. This search is done one-by-one and the decision on whether the amino acid is considered to be a candidate for a is-HIT is based on (1) the amino acid type itself; (2) the position on the amino acid sequence and protein structure if known; and (3) the predicted interaction between that amino acid and its neighbors in sequence and space.

[0136] In an additional embodiment, once one protein within a family of proteins (e.g., IFNα-2b within the cytokine family) is optimized using the methods provided herein for generating LEAD mutants, is-HITs can be readily identified on the remaining proteins within the particular family by identifying the corresponding amino acid positions therein using a structural homology analysis (see, co-pending U.S. application Ser. No. 922, filed the same day herewith, based on U.S. Provisional Application Ser. No. 60/457,135 and to U.S. Provisional Application Ser. No. 60/409,898). The is-HITs identified in this manner then can be subjected to the next step of identifying replacing amino acids and further assayed to obtain LEADs or super-LEADs as described herein.

2) Identifying Replacing Amino Acids

[0137] Once the is-HITs target positions (target loci) have been selected, the next step is identifying those amino acids that will replace the original, such as native, amino acid at each is-HIT position to alter the activity level for the particular feature being evolved. The set of replacing amino acids to be used to replace the original, such as native, amino acid at each is-HIT position can be different and specific for the particular is-HIT position. The choice of the replacing amino acids takes into account the need to preserve the physicochemical properties such as hydrophobicity, charge and polarity, of essential (e.g., catalytic, binding, etc.) residues. The number of replacing amino acids, of the remaining 19 non-native (or non-original) amino acids, that can be used to replace a particular is-HIT target position ranges from 1 up to about 19, from 1 up to about 15, from 1 up to about 10, from 1 up to about 9, from 1 up to about 8, from 1 up to about 7, from 1 up to about 6, from 1 up to about 5, from 1 up to about 4, from 1 up to about 3, or from 1 to 2 amino acid replacements.

[0138] Numerous methods of selecting replacing amino acids are well known in the art. Protein chemists determined that certain amino acid substitutions commonly occur in related proteins from different species. As the protein still functions with these substitutions, the substituted amino acids are compatible with protein structure and function. Often, these substitutions are to a chemically similar amino acid, but other types of changes, although relatively rare, also can occur.

[0139] Knowing the types of changes that are most and least common in a large number of proteins can assist with predicting alignments and amino acid substitutions for any set of protein sequences. Amino acid substitution matrices are used for this purpose.

[0140] In amino acid substitution matrices, amino acids are listed across the top of a matrix and down the side, and each matrix position is filled with a score that reflects how often one amino acid would have been paired with the other in an alignment of related protein sequences. The probability of changing amino acid A into amino acid B is assumed to be identical to the reverse probability of changing B into A. This assumption is made because, for any two sequences, the ancestor amino acid in the phylogenetic tree is usually not known. Additionally, the likelihood of replacement should depend on the product of the frequency of occurrence of the two amino acids and on their chemical and physical similarities. A prediction of this model is that amino acid frequencies will not change over evolutionary time (Dayhoff et al., Atlas of Protein Sequence and Structure, 5(3):345-352, 1978). Below are several exemplary amino acid substitution matrices, including, but not limited to block substitution matrix (BLOSUM), Jones, Gonnet, Fitch, Feng, McLachlan, Grantham, Miyata, Rao, Risler, Johnson and percent accepted mutation (PAM). Any such method known to those of skill in the art can be employed.

[0141] (a) Percent Accepted Mutation (PAM)

[0142] Dayhoff and coworkers developed a model of protein evolution that resulted in the development of a set of widely used replacement matrices (Dayhoff et al., Atlas of Protein Sequence and Structure, 5(3):345-352, 1978) termed percent accepted mutation matrices (PAM). In deriving these matrices, each change in the current amino acid at a particular site is assumed to be independent of previous mutational events at that site. Thus, the probability of change of any amino acid A to amino acid B is the same, regardless of the previous changes at that site and also regardless of the position of amino acid A in a protein sequence.

[0143] In the Dayhoff approach, replacement rates are derived from alignments of protein sequences that are at least 85% identical; this constraint ensures that the likelihood of a particular mutation being the result of a set of successive mutations is low. Because these changes are observed in closely related proteins, they represent amino acid substitutions that do not significantly change the function of the protein.

[0144] Hence, they are called “accepted mutations,” as defined as amino acid changes that are accepted by natural selection.

[0145] (i) PAM Analysis

[0146] In particular embodiments of the methods provided herein, “Percent Accepted Mutation” (PAM; Dayhoff et al., Atlas of Protein Sequence and Structure, 5(3):345-352, 1978, FIG. 7) PAM values are used to select an appropriate group of replacement amino acids. PAM matrices were originally developed to produce alignments between protein sequences based evolutionary distances (see FIG. 7). Because, in a family of proteins or homologous (related) sequences, identical or similar amino acids (85% similarity) are shared, conservative substitutions for, or “allowed point mutations” of the corresponding amino acid residues can be determined throughout an aligned reference sequence. In this regard, “conservative substitutions” of a residue in a reference sequence are those substitutions that are physically and functionally similar to the corresponding reference residues, e.g., that have a similar size, shape, electric charge, chemical properties, including the ability to form covalent or hydrogen bonds, or the like. Particularly suitable conservative amino acid substitutions are those that show the highest scores and fulfill the PAM matrix criteria in the form of “accepted point mutations.” For example, by comparing a family of scoring matrices, Dayhoff et al., Atlas of Protein Sequence and Structure, 5(3):345-352, 1978, found a consistently higher score significance when using PAM250 matrix to analyze a variety of proteins, known to be distantly related.

[0147] (ii) PAM 250

[0148] In a particular embodiment, the PAM250 matrix set forth in FIG. 7 is used for determining the replacing amino acids based on “similarity” criteria. The PAM250 matrix uses data obtained directly from natural evolution to facilitate the selection of replacing amino acids for the is-HITs to generate conservative mutations without much affecting the overall protein function. By using the PAM250 matrix, candidate replacing amino acids are identified from related proteins from different organisms.

[0149] (b) Jones and Gonnet

[0150] This method (see, e.g., Jones et al., Comput. Appl. Biosci., 8:275-282, 1992 and Gonnet et al., Science, 256:1433-1445, 1992) uses much of the same methodology as Dayhoff (see below), but with modern databases. The matrix of Jones et al., is extracted from Release 15.0 of the SWISS-PROT protein sequence database. Point mutations totaling 59,160 from 16,130 protein sequences were used to calculate a PAM250 (see below) matrix.

[0151] The matrix published by Gonnet et al., Science, 256:1433-1445, 1992, was built from a sequence database of 8,344,353 amino acid residues. Each sequence was compared against the entire database, such that 1.7×10⁶ subsequent matches resulted for the significant alignments. These matches were then used to generate a matrix with a PAM distance of 250.

[0152] (c) Fitch and Feng

[0153] Fitch, J. Mol. Evol., 16(1):9-16, 1966 used an exchange matrix that contained for each pair (A, B) of amino acid types the minimum number of nucleotides that must be changed to encode amino acid A instead of amino acid B. Feng et al., J. Mol. Evol., 21:112-125, 1985, used an enhanced version of Fitch, J. Mol. Evol., 16(1):9-16, 1966, to build a Structure-Genetic matrix. In addition to considering the minimum number of base changes required to encode amino acid B instead of A, this method also considers the structural similarity of the amino acids.

[0154] (d) McLachlan, Grantham and Miyata

[0155] McLachlan, J. Mol. Biol., 61:409-424 1971, used 16 protein families, each with 2 to 14 members. The 89 sequences were aligned and the pairwise exchange frequency, observed in 9280 substitutions, was used to generate an exchange matrix with values varying from 0 to 9.

[0156] Grantham, Science, 185:862-864, 1974, considers composition, polarity and molecular volume of amino acid side-chains, properties that were highly correlated to the relative substitution frequencies tabulated by McLachlan, J. Mol. Biol., 61:409-424, 1971, to build the matrix.

[0157] Miyata, J. Mol. Evol, 12:219-236, 1979, uses the volume and polarity values of amino acids published by Grantham, Science, 185:862-864, 1974. For every amino acid type pair, the difference for both properties was calculated and divided by the standard deviation of all the differences. The square root of the sum of both values then is used in the matrix.

[0158] (e) Rao

[0159] Rao, J. Pept. Protein Res., 29:276-281, 1987, employs five amino acid properties to create a matrix; namely, alpha-helical, beta-strand and reverse-turn propensities as well as polarity and hydrophobicity. The standardized properties were summed and the matrix rescaled to the same average as that for PAM (Dayhoff et al., Atlas of Protein Sequence and Structure, 5(3):345-352, 1978).

[0160] (f) Risler

[0161] Risler et al., J. Mol. Biol., 204:1019-1029, 1988, aligned 32 three-dimensional structures from 11 protein families by rigid-body superposition of the backbone topology. Only substitutions were considered where at least three adjacent and equivalent main-chain C alpha atom pairs in the compared structures were each not more than 1.2 Å apart. A total of 2860 substitutions were considered and used to build a matrix based on χ² distance calculations.

[0162] (g) Johnson

[0163] Johnson et al., J. Mol. Biol., 233:716-738, 1993, derived their matrix from the tertiary structural alignment of 65 families in a database of 235 structures created with the method of Sali et al., J. Mol. Biol., 212:403-428, 1990. Their examination of the substitutions was based on the expected and observed ratios of occurrences and the final matrix values were taken as log₁₀ of the ratios.

[0164] (h) Block Substitution Matrix (BLOSUM)

[0165] One empirical approach (Henikoff et al., Proc. Natl. Acad. Sci. USA, 89:10915-10919, 1992) uses local, ungapped alignments of distantly related sequences to derive the blocks amino acid substitution matrix (BLOSUM) series of matrices. The matrix values are based on the observed amino acid substitutions in a larger set of about 2000 conserved amino acid patterns, termed blocks. These blocks act as signatures of families of related proteins. Matrices of this series are identified by a number after the matrix (e.g., BLOSUM50), which refers to the minimum percentage identity of the blocks of multiple aligned amino acids used to construct the matrix. It is noteworthy that these matrices are directly calculated without extrapolations, and are analogous to transition probability matrices P(T) for different values of T, estimated without reference to any rate matrix Q.

[0166] The outcome of these two steps set forth above, which is performed in silico is that: (1) the amino acid positions that will be the target for mutagenesis are identified; these positions are referred to as is-HITs; (2) the replacing amino acids for the original, such as native, amino acids at the is-HITs are identified, thus providing a collection (library) of candidate LEAD mutant molecules that are expected to perform better than the native one and that are assayed for the desired optimized biological activity.

[0167] 3) Physical Construction of Mutant Proteins and Biological Assays

[0168] Once is-HITs are selected as set forth above, replacing amino acids are introduced. Mutant proteins typically are prepared using recombinant DNA methods and assessed in appropriate biological assays for the particular biological activity (feature) optimized (see, e.g., Example 1 and FIG. 5). An exemplary method of preparing the mutant proteins is by mutagenesis of the original, such as native, gene using methods well known in the art. Mutant molecules are generated one-by-one, such as in addressable arrays, such that each individual mutant generated is the single product of each single and independent mutagenesis reaction. Individual mutagenesis reactions are conducted such that they are physically separated from each other, for example, in addressable arrays. Once a population of sets of nucleic acid molecules encoding the respective mutant proteins is prepared, they are transfected one-by-one into appropriate cells for the production of the corresponding mutant proteins. This also can be performed in addressable arrays where each set of nucleic acid molecules encoding a respective mutant protein is introduced into cells confined to a discrete location, such as in a well of a multi-well microtiter plate. Each individual mutant protein is individually phenotypically characterized and performance is quantitatively assessed using assays appropriate for the feature being optimized (i.e., feature being evolved). Again, this step can be performed in addressable arrays. Those mutants displaying a desired increased or decreased performance compared to the original, such as native molecules are identified and designated LEADs.

[0169] From the beginning of the process of generating the mutant DNA molecules up through the readout and analysis of the performance results, each candidate LEAD mutant can be generated, produced and analyzed individually from its own address in an addressable array.

D. Super-LEADs and Additive Directed Mutagenesis (ADM).

[0170] Also provided herein are methods for generating super-LEAD mutant proteins and exemplary resulting super-LEAD mutant products. Super-LEAD mutant proteins contain a combination of single amino acid mutations present in two or more of the respective LEAD mutant proteins. The LEAD mutant proteins can be generated by the 2D scanning methods provided herein or by other methods known to those of skill in the art.

[0171] Super-LEAD mutant proteins have two of more of the single amino acid mutations derived from two or more of the respective LEAD mutant proteins. As described herein, LEAD mutant proteins provided are defined as mutants whose performance or fitness has been optimized with respect to the native protein. LEADs typically contain one single mutation relative to its respective native protein. This mutation represents an appropriate amino acid replacement that takes place at one is-HIT position. Super-LEAD mutant proteins are created such that they carry on the same protein molecule, more than one LEAD mutation, each at a different is-HIT position (see FIG. 3A). In one embodiment, once the LEAD mutant proteins have been identified using the 2D-scanning methods provided herein, super-LEADs can be generated by combining two or more individual LEAD mutant mutations using any method known in the art. These methods, include recombination, mutagenesis and DNA shuffling and any others known to those of skill in the art and/or provided herein, such as additive directional mutagenesis and multi-overlapped primer extensions.

[0172] 1) Additive Directional Mutagenesis.

[0173] Also provided herein are methods for assembling on a single mutant protein multiple mutations present on the individual LEAD molecules, so as to generate super-LEAD mutant proteins. This method is referred to herein as “Additive Directional Mutagenesis” (ADM; see FIG. 4). ADM comprises a repetitive multi-step process where at each step after the creation of the first LEAD mutant protein a new LEAD mutation is added onto the previous LEAD mutant protein to create successive super-LEAD mutant proteins. ADM is not based on genetic recombination mechanisms, nor on shuffling methodologies; instead it is a simple one-mutation-at-a-time process, repeated as many times as necessary until the total number of desired mutations is introduced on the same molecule. To avoid the exponentially increasing number of all possible combinations that can be generated by putting together on the same molecule a given number of single mutations, a method is provided herein that, although it does not cover all the combinatorial possible space, still captures a big part of the combinatorial potential. The word “combinatorial” is used here in its mathematical meaning (i.e., subsets of a group of elements, containing some of the elements in any possible order) and not in the molecular biological or directed evolution meaning (i.e., generating pools, or mixtures, or collections of molecules by randomly mixing their constitutive elements).

[0174] A population of sets of nucleic acid molecules encoding a collection of new super-LEAD mutant molecules is generated, tested and phenotypically characterized one-by-one in addressable arrays. super-LEAD mutant molecules are such that each molecule contains a variable number and type of LEAD mutations. Those molecules displaying further improved fitness for the particular feature being evolved, are referred to as super-LEADs. Super-LEADs may be generated by other methods known to those of skill in the art and tested by the high throughput methods herein. For purposes herein a super-LEAD typically has activity with respect to the function or biological activity of interest that differs from the improved activity of a LEAD by a desired amount, such as at least 10%, 20%, 30%, 40%, 50%, 60%, 70%, 80%, 90%, 100%, 150%, 200% or more from at least one of the LEAD mutants from which it is derived. In yet other embodiments, the change in activity is at least about 2 times, 3 times, 4 times, 5 times, 6 times, 7 times, 8 times, 9 times, 10 times, 20 times, 30 times, 40 times, 50 times, 60 times, 70 times, 80 times, 90 times, 100 times, 200 times, 300 times, 400 times, 500 times, 600 times, 700 times, 800 times, 900 times, 1000 times, or more greater than at least one of the LEAD molecules from which it is derived. As with LEADs, the change in the activity for super-LEADs is dependent upon the activity that is being “evolved.” The desired alteration, which can be either an increase or a reduction in activity, will depend upon the function or property of interest.

[0175] In one embodiment provided herein, the ADM method employs a number of repetitive steps, such that at each step a new mutation is added on a given molecule. Although numerous different ways are possible for combining each LEAD mutation onto a super-LEAD protein, an exemplary way the new mutations (e.g., mutation 1 (m1), mutation 2 (m2), mutation 3 (m3), mutation 4 (m4), mutation 5 (m5), mutation n (mn)) can be added corresponds to the following diagram:

[0176] m1

[0177] m1+m2

[0178] m1+m2+m3

[0179] m1+m2+m3+m4

[0180] m1+m2+m3+m4+m5

[0181] m1+m2+m3+m4+m5+ . . . +mn

[0182] m1+m2+m4

[0183] m1+m2+m4+m5

[0184] m1+m2+m4+m5+ . . . +mn

[0185] m1+m2+m5

[0186] m1+m2+m5+ . . . +mn

[0187] m2

[0188] m2+m3

[0189] m2+m3+m4

[0190] m2+m3+m4+m5

[0191] m2+m3+m4+m5+ . . . +mn

[0192] m2+m4

[0193] m2+m4+m5

[0194] m2+m4+m5+ . . . +mn

[0195] m2+m5

[0196] m2+m5+ . . . +mn

[0197] . . . , etc . . . .

[0198] 2) Multi-Overlapped Primer Extensions.

[0199] Another method for generation of super leads is multi-overlapped primier extensions. This is a method for the rational evolution of proteins using oligonucleotide-mediated mutagenesis. This method is particularly useful for the rational combination of mutant LEADs to form super-LEADs (see FIG. 14). This method allows the simultaneous introduction of several mutations throughout a small protein or protein-region of known sequence (see, e.g., FIGS. 13A through D). Overlapping oligonucleotides of typically around 70 bases in length (since longer oligonucleotides LEAD to increased error) are designed from the DNA sequence (gene) encoding the mutant LEAD proteins in such a way that they overlap with each other on a region of typically around 20 bases. These overlapping oligonucleotides (including or not point mutations) act as both template and primers in a first step of PCR (using a proofreading polymerase, e.g., Pfu DNA polymerase, to avoid unexpected mutations) to create small amounts of full-length gene. The full-length gene resulting from the first PCR then is selectively amplified in a second step of PCR using flanking primers, each one tagged with a restriction site in order to facilitate subsequent cloning. One multi-overlapped extension process yields a full-length (multi-mutated) nucleic acid molecule encoding a candidate super-LEADs protein having multiple mutations therein derived from LEAD mutant proteins.

[0200] Although typically about 70 bases are used to create the overlapping oligonucleotides, the length of additional overlapping oligonucleotides for use herein can range from about 30 bases up to about 100 bases, from about 40 bases up to about 90 bases, from about 50 bases up to about 80 bases, from about 60 bases up to about 75 bases, and from about 65 bases up to about 75 bases. As set forth above, typically about 70 bases are used herein.

[0201] Likewise, although typically the overlapping region of the overlapping oligonucleotides is about 20 bases, the length of other overlapping regions for use herein can range from about 5 bases up to about 40 bases, from about 10 bases up to about 35 bases, from about 15 bases up to about 35 bases, from about 15 bases up to about 25 bases, from about 16 bases up to about 24 bases, from about 17 bases up to about 23 bases, from about 18 bases up to about 22 bases, and from about 19 bases up to about 21 bases. As set forth above, typically about 20 bases are used herein for the overlapping region.

E. Exemplary biological activities for alteration by the 2D-scanning methods

[0202] The 2D methods provided herein are used to alter activity or physical or chemical property of a target polypeptide. Any characteristic (physical, chemical property or activity) can be modified. The protein is selected and the property identified. A suitable assay or method for identifying proteins with the characteristic.

[0203] 1. 2-Dimensional Scanning of Proteins for Increased Resistance to Proteolysis

[0204] The methods of 2-D scanning permit preparation of proteins modified for a selected trait, activity or other phenotype. Among modifications of interest for therapeutic proteins are those that increase protection against protease digestion while maintaining the requisite biological activity. Such changes are useful for producing longer-lasting therapeutic proteins.

[0205] The delivery of stable peptide and protein drugs to patients is a major challenge for the pharmaceutical industry. These types of drugs in the human body are constantly eliminated or taken out of circulation by different physiological processes including internalization, glomerular filtration and proteolysis. The latter is often the limiting process affecting the half-life of proteins used as therapeutic agents in per-oral administration and either intravenous or intramuscular injections.

[0206] The 2D-scanning process provided herein for protein evolution is used to effectively improve protein resistance to proteases and thus increase protein half-life in vitro and, ultimately in vivo. The methods provided herein for designing and generating highly stable, longer lasting proteins, or proteins having a longer half-life include: i) identifying some or all possible target sites on the protein sequence that are susceptible to digestion by one or more specific proteases (these sites are referred to herein as is-HITs); ii) identifying appropriate replacing amino acids, specific for each is-HIT, such that upon replacement of one or more of the original, such as native, amino acids at that specific is-HIT, they can be expected to increase the is-HIT's resistance to digestion by protease while at the same time, maintaining or improving the requisite biological activity of the protein (these proteins with replaced amino acids are the “candidate LEADs”); iii) systematically introducing the specific replacing amino acids at every specific is-HIT target position to generate a collection of candidate LEADs containing the corresponding mutant candidate LEAD molecules. Mutants are generated, produced and phenotypically characterized one-by-one, such as in addressable arrays, such that each mutant molecule contains initially an amino acid replacement at only one is-HIT site.

[0207] In particular embodiments, such as in subsequent rounds, mutant molecules also can be generated that contain one or more amino acids at one or more is-HIT sites that have been replaced by candidate LEAD amino acids. Those mutant proteins carrying one or more mutations at one or more is-HITs, and that display improved protease resistance are called LEADs (one mutation at one is-HIT) and super-LEADs (mutations at more than one is-HIT).

[0208] The first step of the process takes into consideration existing knowledge from different domains. Such knowledge includes:

[0209] (1) knowledge about the galenic and the delivery environment (tissue, organ or corporal fluid) of the particular therapeutic protein in order to establish a list of proteases more likely to be found in that environment. For example, a therapeutic protein in per-oral application is likely to encounter typical proteases of the luminal gastrointestinal tract. In contrast, if this protein were injected in the blood circulation, serum proteases would be implicated in the proteolysis. Based on the specific list of proteases involved, the complete list of all amino acid sequences that potentially could be targeted by the proteases in the list is determined.

[0210] (2) Since protease mixtures in the body are quite complex in composition, almost all the residues in a selected protein sequence potentialy could be targeted for proteolysis (FIG. 6A). Nevertheless, proteins form specific tri-dimensional structures where residues are more or less exposed to the environment and protease action. It can be assumed that those residues constituting the core of a protein are inaccessible to proteases, while those more “exposed” to the environment are better targets for proteases. The probability for every specific amino acid to be “exposed” and accessible to proteases can be taken into account to reduce the number of is-HITs. Consequently, the methods herein consider the analysis with respect to solvent “exposure” or “accessibility” for each individual amino acid in the protein sequence. Solvent accessibility of residues can alternatively be estimated, regardless of any previous knowledge of specific protein structural data, by using an algorithm derived from empirical amino acid probabilities of accessibility, which is expressed in the following equation (Boger et al., Reports of the Sixth International Congress in Immunology, p. 250, 1986):

$$A ( i ) = [ {\prod }_{j = 1}^{6} \_δ {\_}_{i + 4 - j} ] \cdot {[ 0.62 ]}^{- 6}$$

[0211] Briefly, these are fractional probabilities (δ_{—(i)}) determined for an amino acid (i) found on the surface of a protein, which are based upon structural data from a set of several proteins. It is thus possible to calculate the solvent accessibility (A) of an amino acid (A(i)) at sequence position (i−2 to i+3, onto a sliding window of length equal to 6) that is within an average surface accessible to solvent of >20 square angstroms (Å²)

[0212] The protease accessible target amino acids along the protein sequence, i.e., the amino acids to be replaced, are thus identified and are referred to herein as in silico HITs (is-HITs). Amino acids at the is-HITs are then replaced by residues that render the protein less vulnerable or invulnerable to protease digestion while at the same time maintaining the biological activity of the protein. The choice of the replacing amino acids is complicated by (1) the broad target specificity of certain proteases and (2) the need to preserve the physicochemical properties such as hydrophobicity, charge and polarity, of essential (e.g., catalytic, binding, etc.) residues.

[0213] As provided herein, amino acids can be selected by use of the “Percent Accepted Mutation” (PAM; (Dayhoff et al., Atlas of Protein Sequence and Structure, 5(3):345-352, 1978), FIGS. 7 and 8). PAM values, originally developed to produce alignments between protein sequences, are available in the form of probability matrices, which reflect an evolutionary distance. Since, in a family of proteins or homologous (related) proteins, identical or similar amino acids (85% similarity) are shared, conservative substitutions for, or “allowed point mutations” of the corresponding amino acid residues can be determined throughout an aligned reference sequence. In this regard, “conservative substitutions” of a residue in a reference sequence are those substitutions that are physically and functionally similar to the corresponding reference residues, e.g., that have a similar size, shape, electric charge, chemical properties, including the ability to form covalent or hydrogen bonds, and other propers. Conservative substitutions can be those that exhibit the highest scores and fulfill the PAM matrix criteria in the form of “accepted point mutations”. By comparing a family of scoring matrices, Dayhoff et al., Atlas of Protein Sequence and Structure, 5(3):345-352, 1978), found consistently higher score significance when using PAM250 matrix to analyze a variety of proteins, known to be distantly related.

[0214] In particular, the PAM250 matrix was selected for use. The PAM250 matrix is used, by learning directly from natural evolution, to find replacing amino acids for the is-HITs to generate conservative mutations without affecting the protein function. By using PAM250, candidate replacing amino acids are identified from related proteins from different organisms.

[0215] a. Rational Evolution of IFNα-2b for Increased Resistance to Proteolysis

[0216] IFNα-2b is used for a variety of applications. Typically it is used for treatment of type B and C chronic hepatitis. Additional indications include, but are not limited to, melanomas, herpes infections, Kaposi sarcomas and some leukemia and lymphoma cases. Patients receiving interferon are subject to frequent repeat applications of the drug. Since such frequent injections generate uncomfortable physiological as well as undesirable psychological reactions in patients, increasing the half-life of interferons and thus decreasing the necessary frequency of interferon injections, would be extremely useful to the medical community. For example, after injection of native human IFNα-2b injection in mice, as a model system, its presence can be detected in the serum between 3 and 10 hours with a half-life of only around 4 hours. The IFNα-2b completely disappears to undetectable levels by 18-24 hours after injection.

[0217] Provided herein are mutant variants of the IFNα-2b protein that display (a) highly improved stability as assessed by resistance to proteases in vitro and by pharmacokinetics studies in mice and (b) at least comparable biological activity as assessed by antiviral and antiproliferative action compared to the unmodified and wild type native IFNα-2b protein and to at least one pegylated derivative of the wild type native IFNα. As a result, the IFNα-2b mutant proteins provided herein confer a higher half-life and at least comparable antiviral and antiproliferation activity (sufficient for a therapeutic effect) with respect to the native protein and to the pegylated derivatives molecules currently being used for the clinical treatment of hepatitis C infection. Thus, the optimized IFNα-2b protein mutants that possess increased resistance to proteolysis and/or glomerular filtration provided herein would result in a decrease in the frequency of injections needed to maintain a sufficient drug level in serum; which should lead to i) higher comfort and acceptance by patients, ii) lower doses necessary to achieve comparable biological effects, and iii) as a consequence of (ii), an attenuation of the (dose-dependent) secondary effects observed in humans.

[0218] In particular embodiments, the half-life of the IFNα-2b mutants provided herein is increased by an amount selected from at least 10%, at least 20%, at least 30%, at least 40%, at least 50%, at least 60%, at least 70%, at least 80%, at least 90%, at least 100%, at least 150%, at least 200%, at least 250%, at least 300%, at least 350%, at least 400%, at least 450%, at least 500% or more, when compared to the half-life of native human IFNα-2b in either human blood, human serum or an in vitro mixture containing one or more proteases.

[0219] Two methodologies are provided herein to increase the stability of IFNα-2b by amino acid replacement: i) amino acid replacement that leads to higher resistance to proteases by direct destruction of the protease target residue or sequence, while either maintaining or improving the requisite biological activity (such as, for example, antiviral activity or antiproliferation activity), and/or ii) amino acid replacement that leads to a different pattern of N-glycosylation, thus decreasing both glomerular filtration and sensitivity to proteases, while either improving or maintaining the requisite biological activity (such as, for example, antiviral activity or antiproliferation activity).

[0220] The 2D-scanning methods provided herein were used to identify the amino acid changes on IFNα-2b that lead to an increase in stability when challenged either with proteases, human blood lysate or human serum. Increasing protein stability to proteases, human blood lysate or human serum, and/or increasing the molecular size is contemplated herein to provide a longer in vivo half-life for the particular protein molecules, and thus to a reduction in the frequency of necessary injections into patients. The biological activities that have been measured for the IFNα-2b molecules are i) their capacity to inhibit virus replication when added to permissive cells previously infected with the appropriate virus, and ii) their capacity to stimulate cell proliferation when added to the appropriate cells. Prior to the measurement of biological activity, IFNα-2b molecules were challenged with proteases, human blood lysate or human serum during different incubation times. The biological activity measured, corresponds then to the residual biological activity following exposure to the protease-containing mixtures.

[0221] As set forth above, provided herein are methods for the development of IFNα-2b molecules that, while maintaining the requisite biological activity intact, have been rendered less susceptible to digestion by blood proteases and therefore display a longer half-life in blood circulation. In this particular example, the method used included the following specific steps as set forth in Example 2:
[0222] 1) Identifying some or all possible target sites on the protein sequence that are susceptible to digestion by one or more specific proteases (these sites are the is-HITs) and
[0223] 2) Identifying appropriate replacing amino acids, specific for each is-HIT, such that if used to replace one or more of the original amino acids at that specific is-HIT, they can be expected to increase the is-HIT's resistance to digestion by protease while at the same time, keeping the biological activity of the protein unchanged (these replacing amino acids are the “candidate LEADs”).

[0224] As set forth in Example 2, the 3-dimensional structure of IFNα-2b obtained from the NMR structure of IFNα-2a (PDB code 1 ITF) was used to select only those residues exposed to solvent from a list of residues along the IFNα-2b sequence which can be recognized as a substrate for different enzymes present in the serum. Residue 1 corresponds to the first residue of the mature peptide IFNα-2b encoded by nucleotides 580-1074 of sequence accession No. J00207, SEQ ID NO:1. Using this approach, the following 42 amino acid target positions were identified as is-HITs on IFNα-2b, which numbering is that of the mature protein (SEQ ID NO:1): L3, P4, R12, R13, M16, R22, K23, F27, L30, K31, R33, E41, K49, E58, K70, E78, K83, Y89, E96, E107, P109, L110, M111, E113, L117, R120, K121, R125, L128, K131, E132, K133, K134, Y135, P137, M148, R149, E159, L161, R162, K164, and E165. Each of these positions was replaced by residues defined as compatible by the substitution matrix PAM250 while at the same time not generating any new substrates for proteases. For these 42 is-HITs, the residue substitutions determined by PAM250 analysis were as follows:

[0225] R to H, Q

[0226] E to H, Q

[0227] K to Q, T

[0228] L to V, I

[0229] M to I, V

[0230] P to A, S

[0231] Y to I, H.

[0232] 1) Modified IFNα-2b Proteins with Single Amino Acid Substitutions (is-HITs)

[0233] Accordingly provided herein are mutant IFNα-2b proteins that have increased resistance proteolysis compared to the unmodified, typically wild-type, protein. The mutant IFNα-2b proteins include those selected from among proteins containing more single amino acid replacements in SEQ ID NO:1, corresponding to: L by V at position 3; L by I at position 3; P by S at position 4; P by A at position 4; R by H at position 12; R by Q at position 12; R by H at position 13; R by Q at position 13; M by V at position 16; M by I at position 16; R by H at position 22; R by Q at position 22; R by H at position 23; R by Q at position 23; F by I at position 27; F by V at position 27; L by V at position 30; L by I at position 30; K by Q at position 31; K by T at position 31; R by H at position 33; R by Q at position 33; E by Q at position 41; E by H at position 41; K by Q at position 49; K by T at position 49; E by Q at position 58; E by H at position 58; K by Q at position 70; K by T at position 70; E by Q at position 78; E by H at position 78; K by Q at position 83; K by T at position 83; Y by H at position 89; Y by I at position 89; E by Q at position 96; E by H at position 96; E by Q at position 107; E by H at position 107; P by S at position 109; P by A at position 109; L by V at position 110; L by I at position 110; M by V at position 111; M by I at position 111; E by Q at position 113; E by H at position 113; L by V at position 117; L by I at position 117; R by H at position 120; R by Q at position 120; K by Q at position 121; K by T at position 121; R by H at position 125; R by Q at position 125; L by V at position 128; L by I at position 128; K by Q at position 131; K by T at position 131; E by Q at position 132; E by H at position 132; K by Q at position 133; K by T at position 133; K by Q at position 134; K by T at position 134; Y by H at position 135; Y by I at position 135; P by S at position 137; P by A at position 137; M by V at position 148; M by I at position 148; R by H at position 149; R by Q at position 149; E by Q at position 159; E by H at position 159; L by V at position 161; L by I at position 161; R by H at position 162; R by Q at position 162; K by Q at position 164; K by T at position 164; E by Q at position 165; and E by H at position 165.

[0234] 2) LEAD Identification

[0235] Next the specific replacing amino acids (candidate LEADs) are systematically introduced at every specific is-HIT position to generate a collection containing the corresponding mutant IFNα-2b DNA molecules, as set forth in Example 2. The mutant DNA molecules were used to produce the corresponding mutant IFNα-2b protein molecules by transformation or transfection into the appropriate cells. These protein mutants were assayed for (i) protection against proteolysis, (ii) and for antiviral and antiproliferation activity in vitro, (iii) pharmacokinetics in mice. Of particular interest are mutations that increase these activities of the IFNα-2b mutant proteins compared to unmodified wild type IFNα-2b protein and to pegylated derivates of the wild type protein. Based on the results obtained from these assays, each individual IFNα-2b variant was assigned a specific activity. Those variant proteins displaying the highest stability and/or resistance to proteolysis were selected as LEADs. The candidate LEADs that possessed at least as much residual antiviral activity following protease treatment as the control, native IFNα-2b, before protease treatment were elected as LEADs. The results are set forth in Table 2 of Example 2. Using this method, the following mutants selected as LEADs are provided herein and correspond to the group of proteins containing one or more single amino acid replacements in SEQ ID NO:1, corresponding to: F by V at position 27; R by H at position 33; E by Q at position 41; E by H at position 41; E by Q at position 58; E by H at position 58; E by Q at position 78; E by H at position 78; Y by H at position 89; E by Q at position 107; E by H at position 107; P by A at position 109; Lby V at position 110; M by V at position 111; E by Q at position 113; E by H at position 113; L by V at position 117; L by I at position 117; K by Q at position 121; K by T at position 121; R by H at position 125; R by Q at position 125; K by Q at position 133; K by T at position 133; and E by Q at position 159; E by H at position 159

[0236] Also among these are mutations that can have multiple effects. Among mutations described herein, are mutations that result in an increase of the IFNα-2b activity as assessed by detecting the requisite biological activity.

[0237] In another embodiment, IFNα-2b proteins that contain a plurality of mutations based on the LEADs (see Tables in the EXAMPLES, listing the candidate LEADs and LEAD sites), are produced to produce IFNα-2b proteins that have activity that is further optimized. Examples of such proteins are described in the EXAMPLES. Other combinations of mutations can be prepared and tested as described herein to identify other LEADs of interest, particularly those that have further increased IFNα-2b antiviral activity or further increased resistance to proteolysis.

[0238] b. Rational Evolution of interferon β (IFNβ) for Increased Resistance to Proteolysis and/or increased conformational stability

[0239] The 2D-scanning method provided herein (as well as a 3D-scanning method (see, copending U.S. application Ser. No. 37851-922, filed the same day herewith; and described below) were separately applied to interferon β. Treatment with interferon b (IFNβ) is a well established therapy. Typically it is used for treatment of multiple sclerosis (MS). Patients receiving interferon β are subject to frequent repeat applications of the drug. The instability of IFNβ in the blood stream and under the storage conditions is well known. Hence it would be useful to increasing stability (half-life) of IFNβ in serum and also in vitro would improve it as a drug. Provided herein are mutant variants of the IFNβ protein that display improved stability as assessed by resistance to proteases (thereby possessing increased protein half-life) and at least comparable biological activity as assessed by antiviral or antiproliferation activity compared to the unmodified and wild type native IFNβ protein (SEQ ID NO: 499). The IFNβ mutant proteins provided herein confer a higher half-life and at least comparable biological activity with respect to the native sequence. Thus, the optimized IFNβ protein mutants that possess increased resistance to proteolysis provided herein result in a decrease in the frequency of injections needed to maintain a sufficient drug level in serum, thus leading to, for example: i) higher comfort and acceptance by patients, ii) lower doses necessary to achieve comparable biological effects, and iii) as a consequence of (ii), likely attenuation of any secondary effects.

[0240] In particular embodiments, the half-life of each IFNβ mutant provided herein is increased by an amount selected from at least 10%, at least 20%, at least 30%, at least 40%, at least 50%, at least 60%, at least 70%, at least 80%, at least 90%, at least 100%, at least 150%, at least 200%, at least 250%, at least 300%, at least 350%, at least 400%, at least 450%, at least 500% or more, when compared to the half-life of native human IFNβ in either human blood, human serum or an in vitro mixture containing one or more proteases. In other embodiments, the half-life of the IFNβ mutants provided herein is increased by an amount selected from at least 6 times, 7 times, 8 times, 9 times, 10 times, 20 times, 30 times, 40 times, 50 times, 60 times, 70 times, 80 times, 90 times, 100 times, 200 times, 300 times, 400 times, 500 times, 600 times, 700 times, 800 times, 900 times, 1000 times, or more, when compared to the half-life of native human IFNβ in either human blood, human serum or an in vitro mixture containing one or more proteases.

[0241] Two approaches were used herein to increase the stability of IFNβ by amino acid replacement: i) Resistance to proteases: amino acid replacement that leads to higher resistance to proteases by direct destruction of the protease target residue or sequence, while either maintaining or improving the requisite biological activity (e.g., antiviral and anti-proliferation activity), and/or ii) Conformational stability: amino acid replacement that leads to an increase in conformational stability (i.e. half-life at room temperature or at 37° C.), while either improving or maintaining the requisite biological activity (e.g., antiviral and anti-proliferation activity).

[0242] Two methodologies were used to address the improvements described above: (a) 2D-scanning methods were used to identify aminoacid changes that lead to improvement in protease resistance and to improvement in conformational stability, and (b) 3D-scanning, which employs structural homology methods (see, copending U.S. application Serial No. attorney dkt. no.37851-922, filed the same day herewith, based upon U.S. provisional application Ser. Nos. 60/457,135 and 60/409,898) methods also were used to identify aminoacid changes that lead to improvement in protease resistance.

[0243] The 2D-scanning and 3D-scanning methods each were used to identify the amino acid changes on IFNβ that lead to an increase in stability when challenged either with proteases, human blood lysate or human serum. Increasing protein stability to proteases, human blood lysate or human serum is contemplated herein to provide a longer in vivo half-life for the particular protein molecules, and thus a reduction in the frequency of necessary injections into patients. The biological activities that have been measured for the IFNβ molecules are i) their capacity to inhibit virus replication when added to permissive cells previously infected with the appropriate virus, and ii) their capacity to stimulate cell proliferation when added to the appropriate cells. Prior to the measurement of biological activity, IFNβ molecules were challenged with proteases, human blood lysate or human serum during different incubation times. The biological activity measured, corresponds then to the residual biological activity following exposure to the proteolytic mixtures.

[0244] As set forth above, provided herein are methods for the development of IFNβ molecules that, while maintaining the requisite biological activity intact, have been rendered less susceptible to digestion by blood proteases and therefore display a longer half-life in blood circulation. In this particular example, the method used included the following specific steps as set forth in the Examples: For the improvement of resistance to proteases, by 2D-scanning, the method included:

[0245] 1) Identifying some or all possible target sites on the protein sequence that are susceptible to digestion by one or more specific proteases (these sites are the is-HITs); and

[0246] 2) Identifying appropriate replacing amino acids, specific for each is-HIT, such that if used to replace one or more of the original amino acids at that specific is-HIT, they can be expected to increase the is-HIT's resistance to digestion by protease while at the same time, keeping the biological activity of the protein unchanged (these replacing amino acids are the candidate LEADs).

[0247] For the improvement of resistance to proteases, by 3D-scanning (structural homology):

[0248] 1) Identifying some or all possible target sites (is-HITS) on the protein sequence that display an acceptable degree of structural homology around the aminoacid positions mutated in the LEAD molecules previously obtained for IFNα using 2D-scanning, and that are susceptible to digestion by one or more specific proteases; and

[0249] 2) Identifying appropriate replacing amino acids, specific for each is-HIT, such that if used to replace one or more of the original amino acids at that specific is-HIT, they can be expected to increase the is-HIT's resistance to digestion by protease while at the same time, keeping the biological activity of the protein unchanged (these replacing amino acids are the candidate LEADs).

[0250] For the improvement of conformational stability, by 2D-scanning, as provided herein:
[0251] 1) Identifying some or all possible target sites on the protein sequence that are susceptible to being directly involved in the intramolecular flexibility and conformational change (these sites are the is-HITs); and
[0252] 2) Identifying appropriate replacing amino acids, specific for each is-HIT, such that if used to replace one or more of the original amino acids at that specific is-HIT, they can be expected to increase the thermal stability of the molecule while at the same time, keeping the biological activity of the protein unchanged (these replacing amino acids are the candidate LEADs).
   Using the 2D-scanning and 3D-scanning methods and the 3-dimensional structure of IFNβ, the following amino acid target positions were identified as is-HITs on IFNβ, which numbering is that of the mature protein (SEQ ID NO: 499):

[0253] By 3D-scanning: D by Q at position 39, D by H at position 39, D by G at position 39, E by Q at position 42, E by H at position 42, K by Q at position 45, K by T at position 45, K by S at position 45, K by H at position 45, L by V at position 47, L by I at position 47, L by T at position 47, L by Q at position 47, L by H at position 47, L by A at position 47, K by Q at position 52, K by T at position 52, K by S at position 52, K by H at position 52, F by I at position 67, F by V at position 67, R by H at position 71, R by Q at position 71, D by H at position 73, D by G at position 73, D by Q at position 73, E by Q at position 81, E by H at position 81, E by Q at position 107, E by H at position 107, K by Q at position 108, K by T at position 108, K by S at position 108, K by H at position 108, E by Q at position 109, E by H at position 109, D by Q at position 110, D by H at position 110, D by G at position 110, F by I at position 111, F by V at position 111, R by H at position 113, R by Q at position 113, L by V at position 116, L by I at position 116, L by T at position 116, L by Q at position 116, L by H at position 116, L by A at position 116, L by V at position 120, L by I at position 120, L by T at position 120, L by Q at position 120, L by H at position 120, L by A at position 120, K by Q at position 123, K by T at position 123, K by S at position 123, K by H at position 123, R by H at position 124, R by Q at position 124, R by H at position 128, R by Q at position 128, L by V at position 130, L by at position 130, L by T at position 130, L by Q at position 130, L by H at position 130, L by A at position 130, K by Q at position 134, K by T at position 134, K by S at position 134, K by H at position 134, K by Q at position 136, K by T at position 136, K by S at position 136, K by H at position 136, E by Q at position 137, E by H at position 137, Y by H at position 163, Y by I at position 163I, R by H at position 165, R by Q at position 165.

[0254] By 2D-scanning (see Table below for SEQ ID Nos.): M by V at position 1, M by I at position 1, M by T at position 1, M by Q at position 1, M by A at position 1, L by V at position 5, L by I at position 5, L by T at position 5, L by Q at position 5, L by H at position 5, L by A at position 5, F by I at position 8, F by V at position 8, L by V at position 9, L by I at position 9, L by T at position 9, L by Q at position 9, L by H at position 9, L by A at position 9, R by H at position 11, R by Q at position 11, F by I at position 15, F by V at position 15, K by Q at position 19, K by T at position 19, K by S at position 19, K by H at position 19, W by S at position 22, W by H at position 22, N by H at position 25, N by S at position 25, N by Q at position 25, R by H position 27, R by Q position 27, L by V at position 28, L by I at position 28, L by T at position 28, L by Q at position 28, L by H at position 28, L by A at position 28, E by Q at position 29, E by H at position 29, Y by H at position 30, Y by I at position 30, L by V at position 32, L by I at position 32, L by T at position 32, L by Q at position 32, L by H at position 32, L by A at position 32, K by Q at position 33, K by T at position 33, K by S at position 33, K by H at position 33, R by H at position 35, R by Q at position 35, M by V at position 36, M by I at position 36, M by T at position 36, M by Q at position 36, M by A at position 36, D by Q at position 39, D by H at position 39, D by G at position 39, E by Q at position 42, E by H at position 42, K by Q at position 45, K by T at position 45, K by S at position 45, K by H at position 45, L by V at position 47, L by I at position 47, L by T at position 47, L by, Q at position 47, L by H at position 47, L by A at position 47, K by Q at position 52, K by T at position 52, K by S at position 52, K by H at position 52, F by I at position 67, F by V at position 67, R by H at position 71, R by Q at position 71, D by Q at position 73, D by H at position 73, D by G at position 73, E by Q at position 81, E by H at position 81, E by Q at position 85, E by H at position 85, Y by H at position 92, Y by I at position 92, K by Q at position 99, K by T at position 99, K by S at position 99, K by H at position 99, E by Q at position 103, E by H at position 103, E by Q at position 104, E by H at position 104, K by Q at position 105, K by T at position 105, K by S at position 105, K by H at position 105, E by Q at position 107, E by H at position 107, K by Q at position 108, K by T at position 108, K by S at position 108, K by H at position 108, E by Q at position 109, E by H at position 109, D by Q at position 110, D by H at position 110, D by G at position 110, F by I at position 111, F by V at position 111, R by H at position 113, R by Q at position 113, L by V at position 116, L by I at position 116, L by T at position 116, L by Q at position 116, L by H at position 116, L by A at position 116, L by V at position 120, L by I at position 120, L by T at position 120, L by Q at position 120, L by H at position 120, L by A at position 120, K by Q at position 123, K by T at position 123, K by S at position 123, K by H at position 123, R by H at position 124, R by Q at position 124, R by H at position 128, R by Q at position 128, L by V at position 130, L by I at position 130, L by T at position 130, L by Q at position 130, L by H at position 130, L by A at position 130, K by Q at position 134, K by T at position 134, K by S at position 134, K by H at position 134, K by Q at position 136, K by T at position 136, K by S at position 136, K by H at position 136, E by Q at position 137, E by H at position 137, Y by H at position 138, Y by I at position 138, R by H at position 152, R by Q at position 152, Y by H at position 155, Y by I at position 155, R by H at position 159, R by Q at position 159, Y by H at position 163, Y by I at position 163, R by H at position 165, R by Q at position 165, M by D at position 1, M by E at position 1, M by K at position 1, M by N at position 1, M by R at position 1, M by S at position 1, L by D at position 5, L by E at position 5, L by K at position 5, L by N at position 5, L by R at position 5, L by S at position 5, L by D at position 6, L by E at position 6, L by K at position 6, L by N at position 6, L by R at position 6, L by S at position 6, L by Q at position 6, L by T at position 6, F by E at position 8, F by K at position 8, F by R at position 8, F by D at position 8, L by D at position 9, L by E at position 9, L by K at position 9, L by N at position 9, L by R at position 9, L by S at position 9, Q by D at position 10, Q by E at position 10, Q by K at position 10, Q by N at position 10, Q by R at position 10, Q by S at position 10, Q by T at position 10, S by D at position 12, S by E at position 12, S by K at position 12, S by R at position 12, S by D at position 13, S by E at position 13, S by K at position 13, S by R at position 13, S by N at position 13, S by Q at position 13, S by T at position 13, N by D at position 14, N by E at position 14, N by K at position 14, N by Q at position 14, N by R at position 14, N by S at position 14, N by T at position 14, F by D at position 15, F by E at position 15, F by K at position 15, F by R at position 15, Q by D at position 16, Q by E at position 16, Q by K at position 16, Q by N at position 16, Q by R at position 16, Q by S at position 16, Q by T at position 16, C by D at position 17, C by E at position 17, C by K at position 17, C by N at position 17, C by Q at position 17, C by R at position 17, C by S at position 17, C by T at position 17, L by N at position 20, L by Q at position 20, L by R at position 20, L by S at position 20, L by T at position 20, L by D at position 20, L by E at position 20, L by K at position 20, W by D at position 22, W by E at position 22, W by K at position 22, W by R at position 22, Q by D at position 23, Q by E at position 23, Q by K at position 23, Q by R at position 23, L by D at position 24, L by E at position 24, L by K at position 24, L by R at position 24, W by D at position 79, W by E at position 79, W by K at position 79, W by R at position 79, N by D at position 80, N by E at position 80, N by K at position 80, N by R at position 80, T by D at position 82, T by E at position 82, T by K at position 82, T by R at position 82, I by D at position 83, I by E at position 83, I by K at position 83, I by R at position 83, I by N at position 83, I by Q at position 83, I by S at position 83, I by T at position 83, N by D at position 86, N by E at position 86, N by K at position 86, N by R at position 86, N by Q at position 86, N by S at position 86, N by T at position 86, L by D at position 87, L by E at position 87, L by K at position 87, L by R at position 87, L by N at position 87, L by Q at position 87, L by S at position 87, L by T at position 87, A by D at position 89, A by E at position 89, A by K at position 89, A by R at position 89, N by D at position 90, N by E at position 90, N by K at position 90, N by Q at position 90, N by R at position 90, N by S at position 90, N by T at position 90, V by D at position 91, V by E at position 91, V by K at position 91, V by N at position 91, V by Q at position 91, V by R at position 91, V by S at position 91, V by T at position 91, Q by D at position 94, Q by E at position 94, Q by Q at position 94, Q by N at position 94, Q by R at position 94, Q by S at position 94, Q by T at position 94, I by D at position 95, I by E at position 95, I by K at position 95, I by N at position 95, I by Q at position 95, I by R at position 95, I by S at position 95, I by T at position 95, H by D at position 97, H by E at position 97, H by K at position 97, H by N at position 97, H by Q at position 97, H by R at position 97, H by S at position 97, H by T at position 97, L by D at position 98, L by E at position 98, L by K at position 98, L by N at position 98, L by Q at position 98, L by R at position 98, L by S at position 98, L by T at position 98, V by D at position 101, V by E at position 101, V by K at position 101, V by N at position 101, V by Q at position 101, V by R at position 101, V by S at position 101, V by T at position 101, M by C at position 1, L by C at position 6, Q by C at position 10, S by C at position 13, Q by C at position 16, L by C at position 17, V by C at position 101, L by C at position 98, H by C at position 97, Q by C at position 94, V by C at position 91, N by C at position 90. The following table summarizes the mutants provided herein that exhibit altered resistance to proteolysis and/or higher conformational stability:

| SEQ ID NO. | Mutant |
|---|---|
| 212 | (M1V) |
| 213 | (M1I) |
| 214 | (M1T) |
| 215 | (M1A) |
| 216 | (L5V) |
| 217 | (L5I) |
| 218 | (L5T) |
| 219 | (L5Q) |
| 220 | (L5H) |
| 221 | (L5A) |
| 222 | (F8I) |
| 223 | (F8V) |
| 224 | (L9V) |
| 225 | (L9I) |
| 226 | (L9T) |
| 227 | (L9Q) |
| 228 | (L9H) |
| 229 | (L9A) |
| 230 | (R11H) |
| 231 | (R11Q) |
| 232 | (F15I) |
| 233 | (F15V) |
| 234 | (K19Q) |
| 235 | (K19T) |
| 236 | (K19S) |
| 237 | (K19H) |
| 238 | (W22S) |
| 239 | (W22H) |
| 240 | (N25H) |
| 241 | (N25S) |
| 242 | (N25Q) |
| 243 | (R27H) |
| 244 | (R27Q) |
| 245 | (L28V) |
| 246 | (L28I) |
| 247 | (L28T) |
| 248 | (L28Q) |
| 249 | (L28H) |
| 250 | (L28A) |
| 251 | (E29Q) |
| 252 | (E29H) |
| 253 | (Y30H) |
| 254 | (Y30I) |
| 255 | (L32V) |
| 256 | (L32I) |
| 257 | (L32T) |
| 258 | (L32Q) |
| 259 | (L32H) |
| 260 | (L32A) |
| 261 | (M1Q) |
| 262 | (K33Q) |
| 263 | (K33T) |
| 264 | (K33S) |
| 265 | (K33H) |
| 266 | (R35H) |
| 267 | (R35Q) |
| 268 | (M36V) |
| 269 | (M36I) |
| 270 | (M36T) |
| 271 | (M36Q) |
| 272 | (M36A) |
| 273 | (E85Q) |
| 274 | (E85H) |
| 275 | (Y92H) |
| 276 | (Y92I) |
| 277 | (K99Q) |
| 278 | (K99T) |
| 279 | (K99S) |
| 280 | (K99H) |
| 281 | (E103Q) |
| 282 | (E103H) |
| 283 | (E104Q) |
| 284 | (E104H) |
| 285 | (K105Q) |
| 286 | (K105T) |
| 287 | (K105S) |
| 288 | (K105H) |
| 289 | (Y138H) |
| 290 | (Y138I) |
| 291 | (R152H) |
| 292 | (R152Q) |
| 293 | (Y155H) |
| 294 | (Y155I) |
| 295 | (R159H) |
| 296 | (R159Q) |
| 297 | (M1D) |
| 298 | (M1E) |
| 299 | (M1K) |
| 300 | (M1N) |
| 301 | (M1R) |
| 302 | (M1S) |
| 303 | (L5D) |
| 304 | (L5E) |
| 305 | (L5K) |
| 306 | (L5R) |
| 307 | (L5N) |
| 308 | (L5S) |
| 309 | (L6D) |
| 310 | (L6E) |
| 311 | (L6K) |
| 312 | (L6N) |
| 313 | (L6Q) |
| 314 | (L6R) |
| 315 | (L6S) |
| 316 | (L6T) |
| 317 | (F8D) |
| 318 | (F8E) |
| 319 | (F8K) |
| 320 | (F8R) |
| 321 | (L9D) |
| 322 | (L9E) |
| 323 | (L9K) |
| 324 | (L9N) |
| 325 | (L9R) |
| 326 | (L9S) |
| 327 | (Q10D) |
| 328 | (Q10E) |
| 329 | (Q10K) |
| 330 | (Q10N) |
| 331 | (Q10R) |
| 332 | (Q10S) |
| 333 | (Q10T) |
| 334 | (S12D) |
| 335 | (S12E) |
| 336 | (S12K) |
| 337 | (S12R) |
| 338 | (S13D) |
| 339 | (S13E) |
| 340 | (S13K) |
| 341 | (S13N) |
| 342 | (S13Q) |
| 343 | (S13R) |
| 344 | (S13T) |
| 345 | (N14D) |
| 346 | (N14E) |
| 347 | (N14K) |
| 348 | (N14Q) |
| 349 | (N14R) |
| 350 | (N14S) |
| 351 | (N14T) |
| 352 | (F15D) |
| 353 | (F15E) |
| 354 | (F15K) |
| 355 | (F15R) |
| 356 | (Q16D) |
| 357 | (Q16E) |
| 358 | (Q16K) |
| 359 | (Q16N) |
| 360 | (Q16R) |
| 361 | (Q16S) |
| 362 | (Q16T) |
| 363 | (C17D) |
| 364 | (C17E) |
| 365 | (C17K) |
| 366 | (C17N) |
| 367 | (C17Q) |
| 368 | (C17R) |
| 369 | (C17S) |
| 370 | (C17T) |
| 371 | (L20N) |
| 372 | (L20Q) |
| 373 | (L20R) |
| 374 | (L20S) |
| 375 | (L20T) |
| 376 | (L20D) |
| 377 | (L20E) |
| 378 | (L20K) |
| 379 | (W22D) |
| 380 | (W22E) |
| 381 | (W22K) |
| 382 | (W22R) |
| 383 | (Q23D) |
| 384 | (Q23E) |
| 385 | (Q23K) |
| 386 | (Q23R) |
| 387 | (L24D) |
| 388 | (L24E) |
| 389 | (L24K) |
| 390 | (L24R) |
| 391 | (G78D) |
| 392 | (G78E) |
| 393 | (G78K) |
| 394 | (G78R) |
| 395 | (W79D) |
| 396 | (W79E) |
| 397 | (W79K) |
| 398 | (W79R) |
| 399 | (N80D) |
| 400 | (N80E) |
| 401 | (N80K) |
| 402 | (N80R) |
| 403 | (T82D) |
| 404 | (T82E) |
| 405 | (T82K) |
| 406 | (T82R) |
| 407 | (I83D) |
| 408 | (I83E) |
| 409 | (I83K) |
| 410 | (I83R) |
| 411 | (I83N) |
| 412 | (I83Q) |
| 413 | (I83S) |
| 414 | (I83T) |
| 415 | (N86D) |
| 416 | (N86E) |
| 417 | (N86K) |
| 418 | (N86R) |
| 419 | (N86Q) |
| 420 | (N86S) |
| 421 | (N86T) |
| 422 | (L87D) |
| 423 | (L87E) |
| 424 | (L87K) |
| 425 | (L87R) |
| 426 | (L87N) |
| 427 | (L87Q) |
| 428 | (L87S) |
| 429 | (L87T) |
| 430 | (A89D) |
| 431 | (A89E) |
| 432 | (A89K) |
| 433 | (A89R) |
| 434 | (N90D) |
| 435 | (N90E) |
| 436 | (N90K) |
| 437 | (N90Q) |
| 438 | (N90R) |
| 439 | (N90S) |
| 440 | (N90T) |
| 441 | (V91D) |
| 442 | (V91E) |
| 443 | (V91K) |
| 444 | (V91N) |
| 445 | (V91Q) |
| 446 | (V91R) |
| 447 | (V91S) |
| 448 | (V91T) |
| 449 | (Q94D) |
| 450 | (Q94E) |
| 451 | (Q94K) |
| 452 | (Q94N) |
| 453 | (Q94R) |
| 545 | (Q94S) |
| 455 | (Q94T) |
| 456 | (I95D) |
| 457 | (I95E) |
| 458 | (I95K) |
| 459 | (I95N) |
| 460 | (I95Q) |
| 461 | (I95R) |
| 462 | (I95S) |
| 463 | (I95T) |
| 464 | (H97D) |
| 465 | (H97E) |
| 466 | (H97K) |
| 467 | (H97N) |
| 468 | (H97Q) |
| 469 | (H97R) |
| 470 | (H97S) |
| 471 | (H97T) |
| 472 | (L98D) |
| 473 | (L98E) |
| 474 | (L98K) |
| 475 | (L98N) |
| 476 | (L98Q) |
| 477 | (L98R) |
| 478 | (L98S) |
| 479 | (L98T) |
| 480 | (V101D) |
| 481 | (V101E) |
| 482 | (V101K) |
| 483 | (V101N) |
| 484 | (V101Q) |
| 485 | (V101R) |
| 486 | (V101S) |
| 487 | (V101T) |
| 488 | (M1C) |
| 489 | (V101C) |
| 490 | (L6C) |
| 491 | (L98C) |
| 492 | (Q10C) |
| 493 | (H97C) |
| 494 | (S13C) |
| 495 | (Q94C) |
| 496 | (Q16C) |
| 497 | (N90C) |
| 498 | (V91C) |

[0255] 2. 2D-scanning of Proteins for Increased Digestibility

[0256] The rational mutagenesis methods provided herein also can be used to evolve proteins that are contained in agronomic consumables, crops or foodstuff, such that these proteins display either decreased or abolished secondary effects (such as toxic or allergenic effects) on the consumer. For example, toxic or allergenic effects are attributable to a lack of (or incomplete) digestion of particular proteins in the gut. Thus, it would be useful to increase digestibility of the proteins concerned, while preserving their biological activity. For this purpose, a similar approach to the methods provided herein for increasing protein stability (e.g., see IFNα-2b mutants herein) can be used. Most allergens are resistant to gastric acid and to digestive proteases (Fuchs et al., Food Technology, 50:83-88, 1996; Astwood et al., Nature Biotechnology, 14:1269-1273, 1996), whereas common plant proteins are not. Since agronomic consumables, crops or foodstuff are typically for oral consumption, proteases of the luminal gastrointestinal tract, such as pepsin, trypsin and chimiotrypsin (Woodley, Crit. Rev. Ther. Drug., 11:61-95, 1994; Bernkop-Schnürch, J. Control. Release, 52:1-16, 1998), are included in the list of proteases by which the evolving protein is rendered digestible.

[0257] In silico-HITs for the selected protease mixtures as well as the appropriate replacing amino acids can be identified according to the methods provided herein along a particular protein sequence using the PAM250 matrix analysis in such a way that the introduction of protease-specific target residues does not affect the protein's primary biological function in the agronomic consumable, crop or foodstuff. It has been established that physical stability increases the opportunity for a protein to be absorbed in the body and cause systemic effects such as toxicity or allergenicity (Cockburn, J. Biotechnol., (in press), 2002). Accordingly, the introduction of new and frequent protease-specific is-HIT target residues, even in buried regions of the protein structure, is contemplated herein to increase the protein digestibility by a further rapid luminal protease attack (secreted and membrane-bound proteases), which would transiently yield smaller and less allergenic or toxic peptides in the gastrointestinal tract. These methods provided herein are useful in that they are contemplated to reduce the impact of safety and provide a security perspective for genetically modified food.

[0258] Accordingly, methods are provided herein for designing and generating mutant proteins that have decreased stability, have increased digestibility, or a shorter lasting in serum or protease mixtures, or have a short half-life, compared to unmodified and/or wild type protein, wherein the methods comprise a first step of identifying some or all possible target sites on the protein sequence that are susceptible to be easily converted, by mutation, into target sites for one or more specific proteases (these sites are the is-HITs). The second step is identifying the appropriate replacing amino acids, specific for each is-HIT, such that if used to replace one or more of the native amino acids at that specific is-HIT, they can be expected to make the is-HIT susceptible to digestion by particular proteases while at the same time, maintaining or improving the desired biological activity of the protein (these replacing amino acids are referred to as “candidate LEADs”). To identify replacing amino acids, the PAM250 matrix described in Example 2 is used.

[0259] Next, the specific replacing amino acids (candidate LEADs) are introduced at every specific is-HIT position so as to generate a collection containing the corresponding mutant molecules. Mutants are generated, produced and phenotypically characterized one-by-one, in addressable arrays, such that each mutant molecule contains initially amino acid replacements at only one is-HIT site. In subsequent rounds mutant molecules also can be generated such that they contain one or more amino acids at one or more is-HIT sites that have been replaced by candidate LEAD amino acids. Those mutant proteins carrying one or more mutations at one or more is-HITs, and that display improved protease sensitivity are called LEADs.

[0260] 3. 2D-scanning of Proteins for Increased Thermostability to Protect Proteins Against Heat

[0261] During evolution proteins have evolved to fit to particular roles in the living cells, which determine a specific environment for protein function. Undoubtedly, proteins with industrial interest are not supposed to resist the extreme environmental conditions present in biotechnological processes such as high temperatures and extreme pH. Provided herein are rational mutagenesis methods for the thermostabilization of proteins, based on the 2D-scanning described above, to develop proteins able to perform native functions at high temperatures. Accordingly, provided herein are methods for designing and generating highly thermostable proteins is provided herein comprising a first step of identifying some or all possible target sites on the protein sequence that are susceptible to become, by mutation, a part of a pair of amino acids that would constitute a link or bridge between two distant parts of the protein structure (these sites are referred to herein as the is-HITs). In this case, is-HITs are all amino acids that are located, on the 3-dimensional structure of the protein, in spatial positions such that they face another amino acid at a certain maximal distance. The two facing amino acids involved are considered to make part of a “stabilizing doublet.” The link can be comprised of H-bonds, +/− charge interactions, disulfide bonds. Links or bridges are expected to stabilize the protein structure by introducing rigidity in it.

[0262] Once the is-HITs are identified, the second step comprises identifying the appropriate replacing amino acids, specific for each is-HIT, such that if used to replace one or more of the native amino acids at that specific is-HIT, generate a link or bridge in the protein structure while at the same time, maintaining or improving the requisite biological activity of the protein (these replacing amino acids are dubbed “candidate LEADs”). The rationale behind these two steps is to increase protein stability by the introduction of additional linking structures such as disulfide bonds, salt bridges or hydrogen bonds in proteins at every single position where it is possible.

[0263] Next, the specific replacing amino acids (candidate LEADs) are introduced at every specific is-HIT position so as to generate a collection containing the corresponding candidate LEAD mutant molecules. Individual mutants are then generated such that, each contains only 2 amino acid replacements, involving a different “stabilizing doublet.” The introduction of additional disulfide bonds includes replacing one or two residues by cysteine along the protein sequence in such a way that their thiol groups remain closer than 2.1 Å, in the tertiary structure of the protein (FIG. 9A through B). The introduction of salt bridges and hydrogen bonds includes replacements of native residues by either charged or polar amino acids, located at the appropriate positions on the protein tertiary structure such that their interaction with each other can generate a tighter structure. In another embodiment, the method to thermostabilize proteins herein includes the replacement of all and every native amino acids located in surface loops of the 3-dimensional structure of the protein, into proline. Again, each initial individual mutant contains only one amino acid replacement at a time. The rationale behind this approach is based on the observation that proline substitutions in amino acid positions involved in ‘loops’ are less permissive to flexibility.

[0264] Mutants are generated, produced and phenotypically characterized one-by-one, in addressable arrays, such that each mutant molecule contains initially amino acid replacements at only one pair of is-HIT sites. In subsequent rounds mutant molecules also can be generated such that they contain one or more amino acids at one or more pairs of is-HIT sites that have been replaced by candidate LEAD amino acids. Those mutant proteins carrying one or more mutations at one or more is-HITs, and that display improved resistance to heat are called LEADs.

[0265] As used herein, the phrase “at high temperatures” refers to at least 5 degrees, at least 10 degrees, at least 15 degrees, at least 20 degrees, at least 25 degrees, at least 30 degrees, at least 40 degrees, at least 50 degrees, at least 60 degrees, at least 70 degrees, at least 80 degrees, at least 90 degrees, up to at least 100 degrees, or more above the optimal temperature for the desired biological activity of the respective native protein. In the above approaches for increasing thermostability, a previous knowledge on the 3-dimensional structure of the protein is necessary. In another rational method to thermostabilize proteins herein, Gly→Ala substitutions are considered regardless the location in the tertiary protein structure and, thus, knowledge of the 3-dimensional structure of the protein is not necessary. The rationale behind this approach is based on the observation that i) glycine is highly permissive to flexibility, and ii) alanine substitutions are considered to be as “entropy-stabilizing” changes. Thus, based on very basic concepts on protein stability, we provide herein a variety of methods to increase protein thermostability. These strategies rely on, but are not limited nor restricted by, predictions and hypotheses on the behavior of specific amino acid replacements.

[0266] 4. Improvement of Protein Antigenicity

[0267] Viral epidemics reflect the effectiveness and remarkable performance of some virus to escape from immune response. Viruses can do this by their amazing ability to mutate and exchange gene segments, leading to a high variability of weakly antigenic sites and/or the lack of production of memory lymphatic cells. Against such infective antigenic drift and antigenic shift (also named reassortment), the body appears defenseless and for some viruses depend on health-assuring vaccination. However, vaccine efficacy also is challenged whenever newly drift variants and/or reassortants emerge. In such cases, new vaccination formulas appear indispensable.

[0268] Provided herein are high throughput methods to evolve viral proteins that display low variability and weak immunogenicity, in order to increase both epitope exposure and immunogenicity in an attempt to develop long-lasting efficiency vaccines. A long-lasting vaccine would be composed by viral proteins that have been evolved such that they would expose poorly uncovered epitopes, which could be recognized by antibodies leading thereby to the production of memory lymphocytes. The rationale behind the increase in epitope exposure and immunogenicity would be the local destabilization of the protein structure, intended to expose poorly uncovered epitopes.

[0269] Methods to locally destabilize structural regions of the evolving proteins include herein the use of the basic concepts defining protein stability. In one embodiment, the methods include the substitution of Pro into Ala: the substitution of “(loop)-stabilizing” proline residues, at each position occupied by proline (is-HITs), by the replacing alanine amino acid. These sorts of mutations are expected to decrease rigidity at the level of proline-produced turns, resulting in loops that increase their “mobility” thereby uncovering new epitopes. In another embodiment, the methods include the substitution of Gly into large side chains and high steric hindrance amino acids (F, W, and Y). These replacements are contemplated herein to disturb Gly-compatible turns and thereby lead to the exposure of new epitopes. In another embodiment, a full length Proline-scan is conducted, which is a systematic replacement of native amino acids by proline, along entire length of the protein. The rationale is based on the reported ability of prolines to induce turns in loop regions and kinks in helices, thus leading to localized loss of protein structure. In another embodiment, the methods include the substitution of Cys into Ser. Removing disulfide bonds by replacing cysteine residues by serine would lead to perturbations in the natural protein folding and stability, which is contemplated to herein to increase epitope exposure and immunogenicity. In another embodiment, the replacement of residues involved in the formation of hydrogen bonds and salt bridges on the protein surface, by for instance hydrophobic amino acids, is expected to interfere with the hydrogen bond formation and lead to a local wobbling of protein regions, which would facilitate the presentation of previously covered epitopes (FIG. 10A through B).

[0270] Accordingly, provided herein are methods for designing and generating highly antigenic proteins comprising a first step of identifying some or all possible target sites (the is-HITS) on the protein sequence that are susceptible to significantly change the protein conformation whenever the native amino acids at those target sites are changed by other specific amino acids, such as Proline, Glycine. The second step is to identify the appropriate replacing amino acids, specific for each is-HIT, such that if used to replace one or more of the native amino acids at that specific is-HIT, they can be expected to expose new epitopes or to increase exposure of already exposed epitopes thus increasing immunogenicity of the protein; (these replacing amino acids are named “candidate LEADs”). To identify replacing amino acids, the PAM250 matrix described in Example 2 can be used.

[0271] Next, the specific replacing amino acids (candidate LEADs) are introduced at every specific is-HIT position so as to generate a collection containing the corresponding candidate LEAD mutant molecules. Mutants are generated, produced and phenotypically characterized one-by-one, in addressable arrays, such that each mutant molecule contains initially amino acid replacements at only one is-HIT site. In subsequent rounds mutant molecules also can be generated such that they contain one or more amino acids at one or more is-HIT sites that have been replaced by candidate LEAD amino acids. Those mutant proteins carrying one or more mutations at one or more is-HITs, and that display an improved immunogenicity are called LEADs.

[0272] Also provided herein are methods for designing and generating highly antigenic proteins comprising performing a “proline-scan” on a particular protein. A collection of mutants is generated in which each individual mutant contains a single amino acid replacement such that each native amino acid is replaced by a proline. Mutants are generated, produced and phenotypically characterized one-by-one, in addressable arrays, such that each mutant molecule contains initially only one amino acid replacement by proline. In subsequent rounds mutant molecules also can be generated such that they contain one or more amino acid replacements by proline. Those mutant proteins carrying one or more mutations (replacements by proline) and that display an improved immunogenicity are called LEADs.

[0273] 5. Optimization of Polypeptides whose Function Depends on their Amphipathic Character

[0274] Certain polypeptides are per se amphipathic molecules (i.e., one portion is water-soluble and the other part water-insoluble). Some other polypeptides adopt the amphipathic molecular design depending on the physicochemical conditions of the local environment (including pH, salinity, and temperature) or once a contact with biological membranes is established. For the amphipathic polypeptides or proteins, the amphipathic property is often at the basis of their biological role or activity (FIG. 11). This may involve interactions between protein-protein (glycoprotein, proteins bearing oligosaccharides), protein-substrate, protein-allocrite, protein-ligand, protein-phospholipid, protein-glycolipid, protein-cholesterol or protein-nucleic acid (DNA or RNA). The amphipathic character arises from the presence of hydrophobic and charged (hydrophilic) clusters of amino acids disposed in such a way that two faces can be distinguished in the secondary or tertiary protein structure. In this context, cationic and anionic peptides presenting an amphipathic character are directly concerned. It is contemplated herein that the introduction of specific replacing amino acids bearing a charge that is different from that at the corresponding is-HITs would participate in the formation of new local electrostatic interactions, thus having measurable effects of the protein activity. Such effects can be expected to be highly residue- and/or site-specific. Despite sharing the same electric charge, basic residues, arginine, lysine and histidine, display different chemical properties: arginine and lysine are strongly basic residues (pKa of 12.48 and 10.54 for their respective side chains), whereas histidine is a weakly basic residue (pKa of 6.04 for its side chain).

[0275] Methods are provided herein to optimize the biological roles or activities of polypeptides based on their amphipathic character, by performing a “scanning” of charged (i.e., arginine, lysine, histidine, glutamate and aspartate) and/or hydrophobic residues (e.g., valine, leucine, phenylalanine, tryptophan, glycine). Accordingly, depending on the amphipathic polypeptide, one or more of the above replacing residues will follow a sequential replacement of selected residues along the polypeptide sequence, in an attempt to optimize the position, number and nature (cationic or anionic) of charges and hydrophobic residues fitting to an optimized trait. FIGS. 13A through D present steps followed with an exemplary polypeptide, wherein a series of substitutions, after a “K/R scanning” and “hydrophobic scanning,” are intended to optimize its biological role or activity through its amphipathic trait. An innovative method provided herein referred to as “multi-overlapped primer extensions” (see FIG. 14) was used to simultaneously introduce mutations in such short sequences as the one illustrated in FIGS. 13A through D.

[0276] Accordingly, provided herein are methods for designing and generating “highly amphipathic” proteins comprising a first step of identifying some or all possible target sites on the protein sequence that are susceptible to significantly change the amphipathic properties of the protein whenever the native amino acids at those sites are changed by other specific amino acids such as arginine or lysine; (these sites are the is-HITs). The next step is identifying the appropriate replacing amino acids, specific for each is-HIT, such that if used to replace one or more of the native amino acids at that specific is-HIT, they can be expected to increase the amphipathic properties of the protein while at the same time, maintaining or improving the requisite biological activity of the protein (these replacing amino acids are referred to as the “candidate LEADs.” To identify replacing amino acids, the PAM250 matrix described in Example 2 can be used.

[0277] Next, the specific replacing amino acids (candidate LEADs) are introduced at every specific is-HIT position so that to generate a collection containing the corresponding mutant molecules. Mutants are generated, produced and phenotypically characterized one-by-one, in addressable arrays, such that each mutant molecule contains initially amino acid replacements at only one is-HIT site. In subsequent rounds mutant molecules also can be generated such that they contain one or more amino acids at one or more is-HIT sites that have been replaced by candidate LEAD amino acids. Those mutant proteins carrying one or more mutations at one or more is-HITs, and that display improved amphipathic properties are called LEADs.

[0278] Also provided herein are methods for designing and generating highly amphipathic proteins comprising performing either an “arginine-scanning” or a “lysine-scanning” on the particular protein. A collection of mutants is generated in which each individual mutant contains a single amino acid replacement such that each native amino acid is replaced by either arginine or lysine. Mutants are generated, produced and phenotypically characterized one-by-one, in addressable arrays, such that each mutant molecule contains initially only one amino acid replacement by either arginine or lysine. In subsequent rounds mutant molecules also can be generated such that they contain one or more amino acid replacements by either arginine or lysine. Those mutant proteins carrying one or more mutations (replacements by either arginine or lysine) and that display improved amphipathic properties are called LEADs.

[0279] 6. Ligand-receptor Interactions

[0280] The 2D-scanning methods provided herein also can be used to generate ligand agonists or antagonists (such as negative dominant mutant ligand proteins) for binding to their respective receptors. It is well known that the activity of receptor binding proteins is a direct function of their binding affinity for their respective receptors. For example, strong binding affinity leads to high activity; whereas in contrast, no binding results in the absence of activity. Contemplated herein is the design and generation of: (1) ligand protein mutants with enhanced affinity for their receptors while at the same time having an improved biological activity (agonists); as well as, in contrast, (2) dominant negative ligand protein mutants that bind to their receptors without inducing any cellular response (antagonists).

[0281] Accordingly, provided herein are methods for designing and generating high-affinity binding proteins that either maintain (agonists) or have lost (antagonists) their receptor-mediated biological activity while keeping their receptor-binding activity, the method comprising a first step of identifying, in silico, some or all possible target sites on the protein sequence that are susceptible to increase its binding affinity for the corresponding receptor (these sites are the is-HITs). The second step is identifying appropriate replacing amino acids, specific for each is-HIT, such that if used to replace one or more of the native amino acids at that specific is-HIT, they can be expected to increase binding affinity to the corresponding receptor while at the same time, either maintaining the desired biological activity of the protein (agonist protein) or abolishing the biological activity of the (antagonist) protein (these replacing amino acids are referred to as “candidate LEADs”). To identify replacing amino acids, the PAM250 matrix described in Example 2 can be used.

[0282] Next, the specific replacing amino acids (candidate LEADs) are introduced at every specific is-HIT position so as to generate a collection containing the corresponding mutant candidate LEAD molecules. Mutants are generated, produced and phenotypically characterized one-by-one, in addressable arrays, such that each mutant molecule contains initially amino acid replacements at only one is-HIT site. In subsequent rounds mutant molecules also can be generated such that they contain one or more amino acids at one or more is-HIT sites that have been replaced by candidate LEAD amino acids.

[0283] In another embodiment to generate such antagonist mutants, the first step comprises an amino acid-scanning (e.g., an alanine-scan). The amino acid scanning is used to identify each and every target amino acid residue involved in the binding site(s) on the protein referred to herein as the HITs. This information would then be used, using the 2D-scanning approach and based on the 3-dimensional structure of the protein, to identify the replacing amino acids needed to generate antagonist mutants. The use of “amino acid scanning” to identify the residues involved in the interaction has higher information content than the sole conclusions, which derive from 3-dimensional structure of proteins. While these 3-dimensional protein structures represent conformations that could be non-native and therefore non-active, the amino acid scanning identifies residues at the binding site(s) through a biological assay. Therefore, it reflects conditions that are closer to the physiological conditions than those reflected by 3-dimensional structural methods.

[0284] 7. Protein Redesign

[0285] Provided herein are methods for redesigning and generating new versions of native or modified proteins, such as IFNα-2b (see FIG. 3B). Using these methods, the redesigned protein maintains either sufficient, typically equal or improved levels of a selected phenotype, such as a biological activity, of the original protein, while at the same time its amino acid sequence is changed by replacement of up to less than 1% (i.e., 1, 2, 3 or more amino acid residues), at least 1%, at least 2%, at least 3%, at least 4%, at least 5%, at least 6%, at least 7%, at least 8%, at least 9%, at least 10%, at least 12%, at least 14%, at least 16%, at least 18%, at least 20%, at least 30%, at least 40% up to 50% or more of its native amino acids by the appropriate pseudo-wild type amino acids. Pseudo-wild type amino acids are those amino acids such that when they replace an original, such as native, amino acid at a given position on the protein sequence, the resulting protein displays substantially the same levels of biological activity (or sufficient activity for its therapeutic or other use) compared to the original, such as native, protein. In other embodiments, pseudo-wild type amino acids are those amino acids such that when they replace an original, such as native, amino acid at a given position on the protein sequence, the resulting protein displays the same phenotype, such as levels of biological activity, compared to an original, typically a native, protein. Pseudo-wild type amino acids and the appropriate replacing positions can be detected and identified by any analytical or predictive means; such as for example, by performing an Alanine-scanning. Any other amino acid, particularly another amino acid that has a neutral effect on structure, such as Gly or Ser, also can be used for the scan. All those replacements of original, such as native, amino acids by Ala that do not lead to the generation of a HIT (a protein that has lost the desired biological activity), have either led to the generation of a LEAD (a protein with increased biological activity); or the replacement by Ala will be a neutral replacement, i.e., the resulting protein will display comparable levels of biological activity compared to the original, such as native, protein. The methods provided herein for protein redesign of proteins, such as IFNα-2b, are intended to design and generate “artificial” (versus naturally existing) proteins, such that they contain sequences of amino acids that differ from the naturally-occurring sequences, but that display biological activities characteristic of the original, such as native, protein. These redesigned proteins (pseudo wild types) can be used to avoid potential side effects that might otherwise exist in other forms of proteins for treatment of disease. Other uses of redesigned proteins provided herein are to establish cross-talk between pathways triggered by different proteins; to facilitate structural biology by generating mutants that can be crystallized while maintaining activity; and to destroy an activity of a protein without changing a second activity or multiple additional activities.

[0286] In one embodiment, a method for obtaining redesigned proteins comprises i) identifying some or all possible target sites on the protein sequence that are susceptible to amino acid replacement without losing protein activity (protein activity in a largest sense of the term: enzymatic, binding, hormone, etc.) (These sites are the pseudo-wild type, ψ-wt sites); ii) identifying appropriate replacing amino acids (ψ-wt amino acids), specific for each ψ-wt site, such that if used to replace the native amino acids at that specific ψ-wt site, they can be expected to generate a protein with comparable biological activity compared to the original, such as native, protein, thus keeping the biological activity of the protein substantially unchanged; iii) systematically introducing the specific ψ-wt amino acids at every specific ψ-wt position so as to generate a collection containing the corresponding mutant molecules. Mutants are generated, produced and phenotypically characterized one-by-one, in addressable arrays, such that each mutant molecule contains initially amino acid replacements at only one ψ-wt site. In subsequent rounds mutant molecules also can be generated such that they contain one or more ψ-wt amino acids at one or more ψ-wt sites. Those mutant proteins carrying several mutations at a number of ψ-wt sites, and that display comparable or improved biological activity are called redesigned proteins or ψ-wt proteins. In particular embodiments, at least 1%, at least 2%, at least 3%, at least 4%, at least 5%, at least 6%, at least 7%, at least 8%, at least 9%, at least 10%, at least 15%, at least 20%, at least 25%, or more of the amino acid residue positions on a particular protein, such as IFNα-2b are replaced with an appropriate pseudo-wild type amino acid.

[0287] The first step is an amino acid scan over the full length of the protein. At this step, each and every one of the amino acids in the protein sequence is replaced by a selected reference amino acid, such as alanine. This permits the identification of “redesign-HIT” positions, i.e., positions that are sensitive to amino acid replacement. All of the other positions that are not redesign-HIT positions (i.e., those at which the replacement of the original, such as native, amino acid by the replacing amino acid, for example Ala, does not lead to a drop in protein fitness or biological activity) are referred to herein as “pseudo-wild type” positions. When the replacing amino acid, for example Ala, replaces the original, such as native, amino acid at a non-HIT position, then the replacement is neutral, in terms of protein activity, and the replacing amino acid is said to be a pseudo-wild type amino acid at that position. Pseudo-wild type positions appear to be less sensitive than redesign-HIT positions since they tolerate the amino acid replacement without affecting the protein activity that is being either maintained or improved. Amino acid replacement at the pseudo-wild type positions, result in a non-change in the protein fitness (e.g., possess substantially the same biological activity), while at the same time to a divergence in the resulting protein sequence compared to the original, such as native, sequence.

[0288] In one embodiment, to first identify those amino acid positions on the IFNα-2b protein that are involved or not involved in IFNα-2b protein activity, such as binding activity of IFNα-2b to its receptor, an Ala-scan was performed on the IFNα-2b sequence as set forth in Example 4. For this purpose, each amino acid in the IFNα-2b protein sequence was individually changed to Alanine. Any other amino acid, particularly another amino acid that has a neutral effect on structure, such as Gly or Ser, also can be used. Each resulting mutant IFNα-2b protein was then expressed and the activity of the interferon molecule was then assayed. These particular amino acid positions, referred to herein as HITs would in principle not be suitable targets for amino acid replacement to increase protein stability, because of their involvement in the recognition of IFN-receptor or in the downstream pathways involved in IFN activity. For the Ala-scanning, the biological activity measured for the IFNα-2b molecules was: i) their capacity to inhibit virus replication when added to permissive cells previously infected with the appropriate virus and, ii) their capacity to stimulate cell proliferation when added to the appropriate cells. The relative activity of each individual mutant compared to the native protein was assayed. HITs are those mutants that produce a decrease in the activity of the protein (in the example: all the mutants with activities below about 30% of the native activity.

[0289] In addition, the Alanine-scan was used to identify the amino acid residues on IFNα-2b that when replaced with alanine correspond to ‘pseudo-wild type’ activity, i.e., those that can be replaced by alanine without leading to a decrease in biological activity. Knowledge of these amino acids is useful for the re-design of the IFNα-2b protein. The results are set forth in Table 5, and include pseudo-wild type amino acid positions of IFNα-2b corresponding to SEQ ID NO:1, amino acid residues: 9, 10, 17, 20, 24, 25, 35, 37, 41, 52, 54, 56, 57, 58, 60, 63, 64, 65, 76, 89, and 90.

[0290] Accordingly, provided herein are IFNα-2b mutant proteins that contain one or more pseudo-wild type mutations at amino acid positions of IFNα-2b corresponding to SEQ ID NO:1, amino acid residues: 9, 10, 17, 20, 24, 25, 35, 37, 41, 52, 54, 56, 57, 58, 60, 63, 64, 65, 76, 89, and 90. The mutations can be either one or more of insertions, deletions and/or replacements of the native amino acid residue(s). In one embodiment, the psuedo-wild type replacements are mutations with alanine at each position. In another embodiment, the pseudo-wild type replacements are one or more mutations in SEQ ID NO:1 corresponding to:

[0291] P by A at position 4, Q by A at position 5,

[0292] T by A at position 6, L by A at position 9,

[0293] LG by A at position 10, L by A at position 17,

[0294] Q by A at position 20, I by A at position 24,

[0295] S by A at position 25, D by A at position 35,

[0296] G by A at position 37, G by A at position 39,

[0297] E by A at position 41, E by A at position 42,

[0298] E by A at position 51, T by A at position 52,

[0299] P by A at position 54, V by A at position 55,

[0300] L by A at position 56, H by A at position 57,

[0301] E by A at position 58, I by A at position 60,

[0302] I by A at position 63, F by A at position 64,

[0303] N by A at position 65, W by A at position 76,

[0304] D by A at position 77, E by A at position 78,

[0305] L by A at position 81, Y by A at position 85,

[0306] Y by A at position 89, Q by A at position 90,

[0307] G by A at position 104, L by A at position 110,

[0308] S by A at position 115 and E by A at position 146.

[0309] In addition, the IFNα-2b alanine scan revealed the following redesign-HITs having decreased antiviral activity at amino acid positions of IFNα-2b corresponding to SEQ ID NO:1, amino acid residues: 2, 7, 8, 11, 13, 15, 16, 23, 26, 28, 29, 30, 31, 32, 33, 53, 69, 91, 93, 98, and 101. Accordingly, in particular embodiments where it is desired to decrease the viral activity of IFNα-2b, either one or more of insertions, deletions and/or replacements of the native amino acid residue(s) can be carried out at one or more of amino acid positions of IFNα-2b corresponding to SEQ ID NO:1, amino acid residues: 2, 7, 8, 11, 13, 15, 16, 23, 26, 28, 29, 30, 31, 32, 33, 53, 69, 91, 93, 98, and 101.

[0310] Each of the redesign mutations set forth above can be combined with one or more of the IFNα-2b candidate LEAD mutations or one or more of the IFNα-2b LEAD mutants provided herein.

F. 3D-scanning and Its Use for Modifying Cytokines

[0311] Also provided herein is a method of structural homology analysis for comparing proteins regardless of their underlying amino acid sequences. For a subset of proteins families, such as the family of human cytokines, this information is rationally exploited to produce modified proteins. This method of structural homology analysis can be applied to proteins that are evolved by any method, including the 2D scanning method described herein. When used with the 2D method in which a particular phenotype, activity or characteristic of a protein is modified by 2D analysis, the method is referred to as 3D-scanning.

[0312] The use of “structural homology” analysis in combination with the directed evolution methods provided herein provides a powerful technique for identifying and producing various new protein mutants, such as cytokines, having desired biological activities, such as increased resistance to proteolysis. For example, the analysis of the “structural homology” between an optimized mutant version of a given protein and “structurally homologous” proteins allows identification of the corresponding structurally related or structurally similar amino acid positions (also referred to herein as “structurally homologous loci”) on other proteins. This permits identification of mutant versions of the latter that have a desired optimized feature(s) (biological activity, phenotype) in a simple, rapid and predictive manner (regardless of amino acid sequence and sequence homology). Once a mutant version of a protein is developed, then, by applying the rules of structural homology, the corresponding structurally related amino acid positions (and replacing amino acids) on other “structurally homologous” proteins readily are identified, thus allowing a rapid and predictive discovery of the appropriate mutant versions for the new proteins.

[0313] 3-dimensionally structurally equivalent or similar amino acid positions that are located on two or more different protein sequences that share a certain degree of structural homology, have comparable functional tasks (activities and phenotypes). These two amino acids that occupy substantially equivalent 3-dimensional structural space within their respective proteins then can be said to be “structurally similar” or “structurally related” to each other, even if their precise positions on the amino acid sequences, when these sequences are aligned, do not match with each other. The two amino acids also are said to occupy “structurally homologous loci.” “Structural homology” does not take into account the underlying amino acid sequence and solely compares 3-dimensional structures of proteins. Thus, two proteins can be said to have some degree of structural homology whenever they share conformational regions or domains showing comparable structures or shapes with 3-dimensional overlapping in space. Two proteins can be said to have a higher degree of structural homology whenever they share a higher amount of conformational regions or domains showing comparable structures or shapes with 3-dimensional overlapping in space. Amino acids positions on one or more proteins that are “structurally homologous” can be relatively far way from each other in the protein sequences, when these sequences are aligned following the rules of primary sequence homology. Thus, when two or more protein backbones are determined to be structurally homologous, the amino acid residues that are coincident upon three-dimensional structural superposition are referred to as “structurally similar” or “structurally related” amino acid residues in structurally homologous proteins (also referred to as “structurally homologous loci”). Structurally similar amino acid residues are located in substantially equivalent spatial positions in structurally homologous proteins.

[0314] For example, for proteins of average size (approximately 180 residues), two structures with a similar fold will usually display rms deviations not exceeding 3 to 4 angstroms. For example, structurally similar or structurally related amino acid residues can have backbone positions less than 3.5, 3.0, 2.5, 2.0, 1.7 or 1.5 angstrom from each other upon protein superposition. RMS deviation calculations and protein superposition can be carried out using any of a number of methods known in the art. For example, protein superposition and RMS deviation calculations can be carried out using all peptide backbone atoms (e.g., N, C, C(C═O), O and CA (when present)). As another example, protein superposition can be carried out using just one or any combination of peptide backbone atoms, such as, for example, N, C, C(C═O), O and CA (when present). In addition, one skilled in the art will recognize that protein superposition and RMS deviation calculations generally can be performed on only a subset of the entire protein structure. For example, if the protein superposition is carried out using one protein that has many more amino acid residues than another protein, protein superposition can be carried out on the subset (e.g., a domain) of the larger protein that adopts a structure similar to the smaller protein. Similarly, only portions of other proteins can be suitable for superimposition. For example, if the position of the C-terminal residues from two structurally homologous proteins differ significantly, the C-terminal residues can be omitted from the structural superposition or RMS deviation calculations.

[0315] Accordingly, provided herein are methods of rational evolution of proteins based on the identification of potential target sites for mutagenesis (is-HITs) through comparison of patterns of protein backbone folding between structurally related proteins, irrespective of the underlying sequences of the compared proteins. Once the structurally related amino acid positions are identified on the new protein, then suitable amino acid replacement criteria, such as PAM analysis, can be employed to identify candidate LEADs for construction and screening as described herein.

[0316] For example, analysis of “structural homology” between and among a number of related cytokines was used to identify on various members of the cytokine family, other than interferon alpha, those amino acid positions and residues that are structurally similar or structurally related to those found in the IFNα-2b mutants that have been optimized for improved stability. This method can be applied to any desired phenotype using any protein, such as a cytokine, as the starting material to which an evolution procedure, such as the rational directed evolution procedure of U.S. application Ser. No. 10/022,249 or the 2-dimensional scanning method provided herein, is applied. The structurally corresponding residues are then altered on members of the family to produce additional cytokines with similar phenotypic alterations.

[0317] 1) Homology

[0318] Typically, homology between proteins is compared at the level of their amino acid sequences, based on the percent or level of coincidence of individual amino acids, amino acid per amino acid, when sequences are aligned starting from a reference, generally the residue encoded by the start codon. For example, two proteins are said to be “homologous” or to bear some degree of homology whenever their respective amino acid sequences show a certain degree of matching upon alignment comparison. Comparative molecular biology is primarily based on this approach. From the degree of homology or coincidence between amino acid sequences, conclusions can be made on the evolutionary distance between or among two or more protein sequences and biological systems.

[0319] The concept of “convergent evolution” is applied to describe the phenomena by which phylogenetically unrelated organisms or biological systems have evolved to share features related to their anatomy, physiology and structure as a response to common forces, constraints, and evolutionary demands from the surrounding environment and living organisms. Alternatively, “divergent evolution,” is applied to describe the phenomena by which strongly phylogenetically related organisms or biological systems have evolved to diverge from identity or similarity as a response to divergent forces, constraints, and evolutionary demands from the surrounding environment and living organisms.

[0320] In the typical traditional analysis of homologous proteins there are two conceptual biases corresponding to: i) “convergent evolution,” and ii) “divergent evolution.” Whenever the aligned amino acid sequences of two proteins do not match well with each other, these proteins are considered “not related” or “less related” with each other and have different phylogenetic origins. There is no (or low) homology between these proteins and their respective genes are not homologous (or show little homology). If these two “non-homologous” proteins under study share some common functional features (e.g., interaction with other specific molecules, activity), they are determined to have arisen by “convergent evolution,” i.e., by evolution of their non-homologous amino acid sequences, in such a way that they end up generating functionally “related” structures.

[0321] On the other hand, whenever the aligned amino acid sequences of two proteins do match with each other to a certain degree, these proteins are considered to be “related” and to share a common phylogenetic origin. A given degree of homology is assigned between these two proteins and their respective genes likewise share a corresponding degree of homology. During the evolution of their initial highly homologous amino acid sequence, enough changes can be accumulated in such a way that they end up generating “less-related” sequences and less related function. The divergence from perfect matching between these two “homologous” proteins under study is said come from “divergent evolution.”

[0322] 2) 3D-scanning (Structural Homology) methods

[0323] Structural homology refers to homology between the topology and three-dimensional structure of two proteins. Structural homology is not necessarily related to “convergent evolution” or to “divergent evolution,” nor is it related to the underlying amino acid sequence. Rather, structural homology is likely driven (through natural evolution) by the need of a protein to fit specific conformational demands imposed by its environment. Particular structurally homologous “spots” or “loci” would not be allowed to structurally diverge from the original structure, even when its own underlying sequence does diverge. This structural homology is exploited herein to identify loci for mutation.

[0324] Within the amino acid sequence of a protein resides the appropriate biochemical and structural signals to achieve a specific spatial folding in either an independent or a chaperon-assisted manner. Indeed, this specific spatial folding ultimately determines protein traits and activity. Proteins interact with other proteins and molecules in general through their specific topologies and spatial conformations. In principle, these interactions are not based solely on the precise amino acid sequence underlying the involved topology or conformation. If protein traits, activity (behavior and phenotypes) and interactions rely on protein topology and conformation, then evolutionary forces and constraints acting on proteins can be expected to act on topology and conformation. Proteins sharing similar functions will share comparable characteristics in their topology and conformation, despite the underlying amino acid sequences that create those topologies and conformations.

[0325] Numerous methods are known in the art for identifying structurally related amino acid positions with 3-dimensionally structurally homologous proteins. Exemplary methods include, but are not limited to: CATH (Class, Architecture, Topology and Homologous superfamily) which is a hierarchical classification of protein domain structures based on four different levels (Orengo et al., Structure, 5(8):1093-1108, 1997); CE (Combinatorial Extension of the optimal path), which is a method that calculates pairwise structure alignments (Shindyalov et al., Protein Engineering, 11 (9):739-747, 1998); FSSP (Fold classification based on Structure-Structure alignment of Proteins), which is a database based on the complete comparison of all 3-dimensional protein structures that currently reside in the Protein Data Bank (PDB) (Holm et al., Science, 273:595-602, 1996); SCOP (Structural Classification of Proteins), which provides a descriptive database based on the structural and evolutionary relationships between all proteins whose structure is known (Murzin et al., J. Mol. Biol., 247:536-540, 1995); and VAST (Vector Alignment Search Tool), which compares newly determined 3-dimensional protein structure coordinates to those found in the MMDB/PDB database (Gibrat et al., Current Opinion in Structural Biology, 6:377-385, 1995).

[0326] In an exemplary embodiment, the step-by-step process including the use of a program referred to as TOP (see,and Lu, G., J. Appl. Cryst., 33:176-189, 2000; publicly available, for example, at bioinfo1.mbfys.lu.se/TOP is used for protein structure comparison. This program runs two steps for each protein structure comparison. In the first step topology of secondary structure in the two structures is compared. The program uses two points to represent each secondary structure element (alpha helices or beta strands) then systematically searches all the possible super-positions of these elements in 3-dimensional space (defined as the root mean square deviation—rmsd, the angle between the two lines formed by the two points and the line-line distance). The program searches to determine whether additional secondary structure elements can fit by the same superposition operation. If secondary structures that can fit each other exceed a given number, the program identifies the two structures as similar. The program gives as an output a comparison score called “Structural Diversity” that considers the distance between matched α-carbon atoms and the number of matched residues. The lower the “Structural Diversity” score, the more the two structures are similar. In various embodiments herein, the Structural Diversity scores range from 0 up to about 67.

G. 2-D Matrix Representation of Amino Acid Sequence of Protein or Peptide

[0327] The amino acid sequence of proteins is usually represented as a sequence stream of letters or names, each representing one individual amino acid in the sequence. This type of linear representation is appropriate to make comparisons on amino acid sequence, homology/heterology, make co-linear representation with DNA nucleotides sequences (thus allowing to represent the genetic code from DNA to protein in a co-linear way). The information content and the analytical potential of this type of representation is limited and thus limits the scope and the perspective of the analysis on protein sequence/structure relationships that are based upon this type of linear amino-acid string representation.

[0328] Provided herein is a method of representing the amino acid sequence of a protein (e.g., protein sequencing) that advantageously results in i) higher information content and ii) higher analytical potential, than previous linear amino-acid string sequence representations. These methods for the notation of protein sequence are useful to facilitate the analysis of the relationships between protein sequence and structure, which is currently a bottle-neck for the further development of different fields of biology, including those of directed evolution. The method employs a two-dimensional (2-D) matrix representation of the of protein sequence, where the vertical axis represents the amino acid present at the corresponding position indicated on the horizontal axis. The horizontal axis represents the amino acid position along the length protein sequence (such that the first cell corresponds to amino acid position No. 1, the second cell to amino acid position No. 2, etc.). See FIGS. 12 and 13A through D. The matrix always contains 20 cells in one direction (the amino acid type) and a variable number of position-cells depending on the size of the protein, the number of position-cells equaling the number of amino acids in the protein sequence. In FIG. 12, an exemplary protein sequence is shown above the matrix and within the matrix, such that those cells corresponding to the actual sequence of the protein are indicated with shaded squares.

[0329] Once the matrix is constituted, those cells corresponding to the actual sequence of the protein are indicated with either a different color or a sign that differentiates them from the cells not corresponding to the actual protein sequence. For example, for the amino acid sequence: AKRLSL, there will be a sign on the cell corresponding to position No. 1 and amino acid type “A,” a sign for the cell corresponding to position No. 2 and amino acid type “K,” a sign for the cell corresponding to position No. 3 and amino acid type “R,” and so on.

[0330] In another embodiment, a 2-D matrix can be employed for representing the nucleotide sequence of a nucleic acid (e.g., nucleic acid sequencing), such as DNA or RNA, whereby the first vertical axis has 4 cells corresponding to nucleotides A, T, G, C; or A, U, G, C, respectively.

### H. EXAMPLES

[0331] The following examples are included for illustrative purposes only and are not intended to limit the scope of the invention. The specific methods exemplified can be practiced with other species. The examples are intended to exemplify generic processes.

### Example 1

[0332] This example describes a plurality of chronological steps including steps from (i) to (viii):
[0333] (i) cloning of IFNα cDNA in a mammalian cell expression plasmid (section A.1)
[0334] (ii) generation of a collection of targeted mutants on the IFNα cDNA in the mammalian cell expression plasmid (section B)
[0335] (iii) production of IFNα mutants in mammalian cells (section C.1)
[0336] (iv) screening and partial in vitro characterization of IFNα mutants produced in mammalian cells in search of lead mutants (section D)
[0337] (v) cloning of the lead mutants into a bacterial cell expression plasmid (section A.2)
[0338] (vi) expression of lead mutants in bacterial cells (section C.2)
[0339] (vii) in vitro characterization of lead mutants produced in bacteria (section D)
[0340] (viii) in vivo characterization of lead mutants produced in bacteria (section E).
   A. Cloning of IFNα-2b encoding cDNA

[0341] A.1. Cloning of IFN α-2b cDNA in a Mammalian Cell Expression Plasmid

[0342] The IFN α-2b cDNA was first cloned into an mammalian expression vector, prior to the generation of the selected mutations. A library of mutants was then generated such that each individual mutant was created and processed individually, physically separated form each other and in addressable arrays. The mammalian expression vector pSSV9 CMV 0.3 pA was engineered as follows:

[0343] The pSSV9 CMV 0.3 pA was cut by PvuII and religated (this step gets rid of the ITR functions), prior to the introduction of a new EcoRI restriction site by Quickchange mutagenesis (Stratagene). The oligonucleotides primers were:

EcoRl forward primer

(SEQ ID NO: 182)

5′-GCCTGTATGATTTATTGGATGTTGGAATTCC-
CTGATGCGGTATTTTCTCCTTACG-3′
EcoRl reverse primer

(SEQ ID NO: 183)

5′-CGTAAGGAGAAAATACCGCATCAGGGAATT-
CCAACATCCAATAAATCATACAGGC-3′

[0344] The construct sequence was confirmed by using the following oligonucleotides:

Seq Clal forward primer:

(SEQ ID NO: 184)

5′-CTGATTATCAACCGGGGTACATATGATTGAC-
ATGC-3′
Seq Xmnl reverse primer:

(SEQ ID NO: 185)

5′-TACGGGATAATACCGCGCCACATAGCAGAA-C-3′

[0345] Then, the XmnI-ClaI fragment containing the newly introduced EcoRI site was cloned into pSSV9 CMV 0.3 pA (SSV9 is a clone containing the entire adeno-associated virus (AAV) genome inserted into the PvuII site of plasmid pEMBL (see, Du et al. (1996) Gene Ther 3:254-261)) to replace the corresponding wild-type fragment and produce construct pSSV9-2EcoRI.

[0346] The DNA sequence of the IFNα-2b cDNA carried by pDG6 (ATCC accession No. 53169) was confirmed using a pair of internal primers. The sequences of the IFNα-2b-related oligonucleotides for sequencing follow:

(SEQ ID NO: 186)

| | |
|---|---|
| Seq forward primer | 5′-CCTGATGAAGGAGGACTC-3′ |

(SEQ ID NO: 187)

| | |
|---|---|
| Seq reverse primer | 5′-CCAAGCAGCAGATGAGTC-3′ |

[0347] Since the beginning of the IFNα-2b encoding cDNA (the signal peptide encoding sequence) is absent in pDG6, it was added using the oligonucleotide (see below)to the amplified gene. First, the IFNα-2b cDNA was amplified by PCR using pDG6 as template using the following oligonucleotides as primers:

IFNα-2b 5′primer

(SEQ ID NO: 188)

5′-TCAGCTGCAAGTCAAGCTGCTCTGTGGGCTG-3′
IFNα-2b 3′primer

(SEQ ID NO: 189)

5′-GCTCTAGATCATTCCTTACTTCTTAAACTTTC-
TTGCAAGTTTGTTGAC-3′

[0348] The PCR product was then used in an overlapping PCR using the following oligonucleotide sequences, having Hind III or XbaI restriction sites (underlined) or the DNA sequence missing in pDG6 (underlined):

IFNa-2b Hindlll primer

(SEQ ID NO: 190)

5′-CCCAAGCTTATGGCCTTGACCTTTGCTTTACT-GGTG-
3′
IFNa-2b Xbal primer

(SEQ ID NO: 191)

5′-GCTCTAGATCATTCCTTACTTCTTAAACTTTC-
TTGCAAGTTTGTTGAC-3′
IFNa-2b 80bp 5′primer

(SEQ ID NO: 192)

5′-CCCAAGCTTATGGCCTTGACCTTTGCTTTA-
CTGGTGGCCCTCCTGGTGCTCAGCTGCAAGTCAAGCTGCTCTGTGGGCT-
G-3′

[0349] The entire IFNα-2b cDNA was cloned into the pTOPO-TA vector (Invitrogen). After checking gene sequence by automatic DNA sequencing, the HindIII-XbaI fragment containing the gene of interest was subcloned into the corresponding sites of pSSV9-2EcoRI to produce pAAV-EcoRI-IFNalpha-2b (pNB-AAV-IFN alpha-2b).

[0350] A.2 Cloning of the IFN α-2b Leads in an E. coli Expression Plasmid

[0351] A.2.1 Characterization of the Bacterial Cells

[0352] BL21-CodonPlus(DE3)-RP® competent Escherichia coli cells are derived from Stratagene's high-performance BL21-Gold competent cells. These cells enable efficient high-level expression of heterologous proteins in E. coli. Efficient production of heterologous proteins in E. coli is frequently limited by the rarity, in E.coli, of certain tRNAs that are abundant in the organisms from which the heterologous proteins are derived. Availability of tRNAs allows high-level expression of many heterologous recombinant genes in BL21-Codon Plus cells that are poorly expressed in conventional BL21 strains.BL21-CodonPLus(DE3)-RP cells contain a ColE1-compatible, pACYC-based plasmid containing extra copies of the argU and proL tRNA genes.

[0353] A.2.2 Cloning of Wild-type IFN α

[0354] To express IFN α-2b in E.coli cDNA encoding the mature form of IFN-2 α-2b was finally cloned into the plasmid pET-11 (Novagen). Briefly, this cDNA fragment was amplified by PCR using the primers SEQ ID Nos. 208 and 209, respectively:

FOR-IFNA-
5′AACATATGTGTGATCTGCCTCAAACCCACAGCCTGGGTAGC 3′
REV-IFNA-
5′AAGGATCCTCATTCCTTACTTCTTAAACTTTCTTGCAAGTTTGTTG3′

from pSSV9-EcoRI-IFN α-2b (see above), which contains full-length IFN-2 alpha cDNA as a matrix, using Herculase DNA-polymerase (Stratagene). The PCR fragment was subcloned into pTOPO-TA vector (Invitrogen) yielding pTOPO-IFN α-2b. The sequence was verified by sequencing. pET11 IFN α-2b was prepared by insertion of the Ndel-Bam HI (Biolabs) fragment from pTOPO-IFN α-2b into the Ndel-Bam HI sites of pET 11. The DNA sequence of the resulting pET 11-IFN α-2b construct was verified by sequencing and the plasmid was used for IFN α-2b expression in E.coli.

[0355] A.2.3 Cloning of IFN α-2b Mutants from the Mammalian Expression Plasmid into the E.coli Expression Plasmid

[0356] Lead mutants of Interferon alpha were first generated in the pSSV9-IFNα-EcoRI plasmid. With the only exception of E159H and E159Q, all mutants were amplified using the primers below. Primers contained Ndel (in Forward) and BamHl (in Reverse) restriction sites:

FOR-IFNA-

SEQ ID No. 210

5′AAC ATA TGT GTG ATC TGC CTC AAA CCC ACA GCC TGG
GTA GC 3′; and
REV-IFNA-

SEQ ID No. 211

5′AAG GAT CCT CAT TCC TTA CTT CTT AAA CTT TCT TGC
AAG TTT GTT G 3′.

[0357] Mutants E159H and E159Q were amplified using the following primers on reverse side (primer forward was the same than described above):

REV-IFNA-E159H-

SEQ ID No. 500.

5′AAG GAT CCT CAT TCC TTA CTT CTT AAA CTG
TGT TGC AAG TTT GTT G 3′
REV-IFNA-E159Q-

SEQ ID No. 501.

5′AAG GAT CCT CAT TCC TTA CTT CTT AAA CTC
TGT TGC AAG TTT GTT G 3′

[0358] Mutants were amplified with Pfu Turbo Polymerase (Stratagene) according. PCR products were cloned into pTOPO plasmid (Zero Blunt TOPO PCR cloning kit, Invitrogen). The presence of the desired mutations was checked by automatic sequencing. The Ndel+BamHl fragment of the pTOPO-IFNα positive clones was then cloned into Ndel+BamHl sites of the pET11 plasmid.

B. Construction of a Library of IFNα-2b Mutants in a Mammalian Expression Plasmid

[0359] A series of mutagenic primers was designed to generate the appropriate site-specific mutations in the IFNα-2b cDNA. Mutagenesis reactions were performed with the Chameleon® mutagenesis kit (Stratagene) using pNB-AAV-IFNα-2b as the template. Each individual mutagenesis reaction was designed to generate one single mutant protein. Each individual mutagenesis reaction contains one and only one mutagenic primer. For each reaction, 25 pmoles of each (phosphorylated) mutagenic primer were mixed with 0.25 pmoles of template, 25 pmoles of selection primer (introducing a new restriction site), and 2 μl of 10×mutagenesis buffer (100 mM Tris-acetate pH 7.5; 100 mM MgOAc; 500 mM KOAc pH 7.5) into each well of 96 well-plates. To allow DNA annealing, PCR plates were incubated at 98 ° C. during 5 min and immediately placed 5 min on ice, before incubating at room temperature during 30 min. Elongation and ligation reactions were allowed by addition of 7 μl of nucleotide mix (2.86 mM each nucleotide; 1.43×mutagenesis buffer) and 3 μl of a freshly prepared enzyme mixture of dilution buffer (20 mM Tris HCl pH7.5; 10 mM KCl; 10 mM β-mercaptoethanol; 1 mM DTT; 0.1 mM EDTA; 50% glycerol), native T7 DNA polymerase (0.025 U/μl), and T4 DNA ligase (1 U/μl) in a ratio of 1:10, respectively. Reactions were incubated at 37° C. for 1 h before inactivation of T4 DNA ligase at 72° C. during 15 min. In order to eliminate the parental plasmid, 30 μl of a mixture containing 1×enzyme buffer and 10 U of restriction enzyme was added to the mutagenic reactions followed by incubation at 37° C. for at least 3 hours. Next, 90 μl aliquots of XLmutS competent cells (Stratagene) containing 25 mM 8-mercaptoethanol were place in ice-chilled deep-well plates. Then, plates were incubated on ice for 10 min with gentle vortex every 2 min. Transformation of competent cells was performed by adding aliquots of the restriction reactions ( 1/10 of reaction volume) and incubating on ice for 30 min. A heat pulse was performed in a 42° C. water bath for 45 s, followed by incubation on ice for 2 minutes. Preheated SOC medium (0.45 ml) was added to each well and plates were incubated at 37° C. for 1 h with shaking. In order to enrich for mutated plasmids, 1 ml of 2×YT broth medium supplemented with 100 μg/ml ampicillin was added to each transformation mixture followed by overnight incubation at 37° C. with shaking. Plasmid DNA isolation was performed by alkaline lysis using Nucleospin Multi-96 Plus Plasmid Kit (Macherey-Nagel) according to the manufacturer's instructions. Selection of mutated plasmids was performed by digesting 500 μg of plasmid preparation with 10 U of selection endonuclease in an overnight incubation at 37° C. A fraction of the digested reactions ( 1/10 of the total volume) was transformed into 40 μl of Epicurian coli XL1-Blue competent cells (Stratagene) supplemented with 25 mM β-mercaptoethanol.

[0360] Transformation was performed was as described above. Transformants were selected on LB-ampicillin agar plates incubated overnight at 37° C. Isolated colonies were picked up and grown overnight at 37° C. into deep-well plates. Four clones per reaction were screened by endonuclease digestion of a new restriction site introduced by the selection primer. Finally, each mutation that was introduced to produce this library of candidate LEAD IFNα-2b mutant plasmids encoding the proteins set forth in Table 2 of Example 2 was confirmed by automatic DNA sequencing.

C. Production of IFNα-2b Mutants

[0361] C.1 In Mammalian Cells

[0362] IFNα-2b mutants were produced in 293 human embryo kidney (HEK) cells (obtained from ATCC), using Dubelcco's modified Eagle's medium supplemented with glucose (4.5 g/L; Gibco-BRL) and fetal bovine serum (10%, Hyclone). Cells were transiently transfected with the plasmids encoding the IFNα-2b mutants as follows: 0.6×10⁵ cells were seeded into 6 well-plates and grown for 36 h before transfection Confluent cells at about 70%, were supplemented with 2.5 μg of plasmid (IFNα-2b mutants) and 10 mM poly-ethylene-imine (25 KDa PEI, Sigma-Aldrich). After gently shaking, cells were incubated for 16 h. Then, the culture medium was changed with 1 ml of fresh medium supplemented with 1% of serum. IFNα-2b was measured on culture supernatants obtained 40 h after transfection and stored in aliquots at −80° C. until use.

[0363] Supernatants containing IFNα-2b from transfected cells were screened following sequential biological assays as follows. Normalization of IFNα-2b concentration from culture supernatants was performed by enzyme-linked immunoabsorbent assay (ELISA) using a commercial kit (R & D) and following the manufacturer's instructions. This assay includes plates coated with an IFNα-2b monoclonal antibody that can be developed by coupling a secondary antibody conjugated to the horseradish peroxidase (HRP). IFNα-2b concentrations on samples containing (i) wild type IFNα-2b produced under comparable conditions as the mutants, (ii) the IFNα-2b mutants and (iii) control samples(produced from cells expressing GFP) were estimated by using an international reference standard provided by the NIBSC, UK.

[0364] C.2 In Bacteria

[0365] A volume of 200 ml of culture medium (LB/Ampicillin/Chloramphenicol) was inoculated with 5 ml of pre-culture BL21-pCodon+-pET-IFN α-2b muta overnight at 37° C. with constant shaking (225 rpm). The production of IFN α-2b was induced by the addition of 50 μl of 2M IPTG at DO₆₀₀ₙₘ˜0.6

[0366] The culture was continued for 3 additional hours and was centrifuged at 4° C. and 5000 g for 15 minutes. The supernatant (culture medium) was discarded and bacteria were lysed in 8 ml of lysis buffer by thermal shock (freezing—thawing: 37° C.-15 min; −80° C.-10 min; 37° C.-15 min; −80° C.-10 min; 37° C.-15 min). After centrifugation (10000 g, 15 min, 4° C.), the supernatant (soluble proteins fraction) was discarded, and the precipitated material (insoluble protein fraction containing the IFN α-2b protein as inclusion bodies) was purified.

[0367] C.3 Pre-purification of IFN α-2b as Inclusion Bodies in E. coli

[0368] C.3.1 Washing of Inclusion Bodies by Sonication

[0369] Pellets containing the inclusion bodies were suspended in 10 ml of buffer and sonicated (80 watts) on ice, 1 second “on”, 1 second “off” for a total of 4 min. Suspensions were then centrifuged (4° C., 10000 g, 15 min), and supernatants were recovered. Pellets were resuspended in 10 ml of buffer for a new sonication/centrifugation cycle. Triton X-100 was then eliminated by two additional cycles of sonication/centrifugation with buffer. Pellets containing the inclusion bodies were recovered and dissolved. The washed supernatants were stored at 4° C.

[0370] C.3.2 Solubilization of Inclusion Bodies by Denaturation

[0371] Once washed, the inclusion bodies were solubilized in buffer at a concentration estimated in 0.3 mg/ml measuring the OD₂₈₀ (considering the coefficient of molar extinction of IFN α-2b). Solubilization was carried out overnight at 4° C., under shaking.

[0372] C.3.3 Renaturation of IFN α-2b by Dialysis of GdnHCl Samples contained 1 mg of protein at 0.3 mg/ml (5 ml in total) in buffer. The GdnHCl (Hydrochloride Guanidium) present in the samples was eliminated by dialysis (minimum membrane cut=10 kDa) overnight at 4° C. against buffer (1 litre) (final concentration of GdnHCl: 43 Mm). Next, samples were further dialysed against 1 litre of buffer during 2:30 h. This step was repeated two additional times. After dialysis, very little precipitate was visible.

[0373] D. Screening and In Vitro Characterization of IFN α-2b Mutants

[0374] Two activities were measured directly on IFN samples: antiviral and antiproliferation activities. Dose (concentration)—response (activity) experiments for antiviral or antiproliferation activity permitted calculation of the ‘potency’ for antiviral and antiproliferation activities, respectively. Antiviral and antiproliferation activities also were measured after incubation with proteolytic samples, such as specific proteases, mixtures of selected proteases, human serum or human blood. Assessment of activity following incubation with proteolytic samples allowed to determine the residual (antiviral or antiproliferation) activity and the respective kinetics of half-life upon exposure to proteases.

[0375] D. 1. Antiviral Activity

[0376] IFNα-2b protects cells against viral infection by a complex mechanism devoted to create an unfavorable environment for viral proliferation. Cellular antiviral response due to IFNα-2b (IFN anti-viral assay) was assessed using an interferon-sensitive HeLa cell line (ATCC accession no. CCL-2) treated with the encephalomyocarditis virus (EMCV). The assessment of either the virus-induced cytopathic effects (CPE) or the amount of EMCV mRNA in extracts of infected cells by RT-PCR was used to determine IFNα activity in samples.

[0377] D.1.1 Antiviral Activity—Measure by RT-qPCR

[0378] Confluent cells were trypsinized and plated at density 2×10⁴ cells/well in DMEM 5% SVF medium (Day 0). Cells were incubated with IFN α-2b (at a concentration of 500 U/ml) to get 500 pg/ml and 150 pg/well (100μl of IFN solution), during 24 h at 37° C. prior to be challenged with EMCV ( 1/1000 dilution; MOI 100). After an incubation of 16 h, when virus-induced CPE was near maximum in untreated cells, the number of EMCV particles in each well was determined by RT-PCR quantification of EMCV mRNA, using lysates of infected cells. RNA from cell extracts was purified after a DNAse/proteinase K treatment (Applied Biosystems). The CPE was evaluated using both Uptibleu (Interchim) and MTS (Promega) methods, which are based on detecting bio-reductions produced by the metabolic activity of cells in a flourometric and colorimetric manner, respectively. In order to produce a standard curve for EMCV quantification, a 22 bp DNA fragment of the capsid protein-cDNA was amplified by PCR and cloned into pTOPO-TA vector (Invitrogen). Next, RT-PCR quantification of known amounts of pTOPO-TA-EMCV capsid gene was performed using the One-step RT-PCR kit (Applied Biosystems) and the following EMCV-related (cloning) oligonucleotides and probe:

EMCV forward primer

(SEQ ID NO: 193)

5′-CCCCTACATTGAGGCATCCA-3′

EMCV reverse primer

(SEQ ID NO: 194)

5′-CAGGAGCAGGACAAGGTCACT-3′
EMCV probe

(SEQ ID NO: 195)

5′-(FAM)CAGGCGTCAAGACCCAACCGCT(TAMR A)-3′

[0379] D.1.2 Antiviral Activity—Measure by CPE

[0380] Antiviral activity of IFN α-2b was determined by the capacity of the cytokine to protect Hela cells against EMC (mouse encephalomyocarditis) virus-induced cytopathic effects. The day before, Hela cells (2×10⁵ cells/ml) were seeded in flat-bottomed 96-well plates containing 100 μl/well of Dulbecco's MEM-Glutamaxl-sodium pyruvate medium supplemented with 5% SVF and 0.2% of gentamicin. Cells were growth at 37° C. in an atmosphere of 5% CO₂ for 24 hours.

[0381] Two-fold serial dilutions of interferon samples were made with MEM complete media into 96-Deep-Well plates with final concentration ranging from 1600 to 0.6 pg/ml. The medium was aspirated from each well and 100 μl of interferon dilutions were added to Hela cells. Each interferon sample dilution was assessed in triplicate. The two last rows of the plates were filled with 100 μl of medium without interferon dilution samples in order to serve as controls for cells with and without virus. After 24 hours of growth, a 1/1000 EMC virus dilution solution was placed in each well except for the cell control row. Plates were returned to the CO₂ incubator for 48 hours. Then, the medium was aspirated and the cells were stained for 1 hour with 100 μl of Blue staining solutio to determine the proportion of intact cells. Plates were washed in a distilled water bath. The cell bound dye was extracted using 100 μl of ethylene-glycol mono-ethyl-ether (Sigma). The absorbance of the dye was measured using an Elisa plate reader (Spectramax). The antiviral activity of IFN α-2b samples (expressed as number of IU/mg of proteins) was determined as the concentration needed for 50% protection of the cells against EMC virus-induced cytopathic effects. For proteolysis experiments, each point of for the kinetic measurements was assessed at 500 and 166 pg/ml in triplicate.

[0382] D.2 Antiproliferation Activity

[0383] Anti-proliferative activity of interferona-2b was determined by the capacity of the cytokine to inhibit proliferation of Daudi cells. Daudi cells (1×10⁴ cells) were seeded in flat-bottomed 96-well plates containing 50 μl/well of RPMI 1640 medium supplemented with 10% SVF, 1×glutamin and 1 ml of gentamicin. No cell was added to the last row (“H” row) of the flat-bottomed 96-well plates in order to evaluate background absorbance of culture medium.

[0384] At the same time, two-fold serial dilutions of interferon samples were made with RPMI 1640 complete media into 96-Deep-Well plates with final concentration ranging from 6000 to 2.9 pg/ml. Interferon dilutions (50 μl) were added to each well containing 50 μl of Daudi cells. The total volume in each well should now be 100 μl. Each interferon sample dilution was assessed in triplicate. Each well of the “G” row of the plates was filled with 50 μl of RPMI 1640 complete media in order to be used as positive control. The plates are incubated for 72 hours at 37° C. in a humidified, 5% CO2 atmosphere.

[0385] After 72 hours of growth, 20 μl of Cell titer 96 Aqueous one solution reagent (Promega) was added to each well and incubated 1H30 at 37° C. in an atmosphere of 5% CO₂. To measure the amount of colored soluble formazan produced by cellular reduction of the MTS, the absorbance of the dye was measured using an Elisa plate reader (spectramax) at 490 nm.

[0386] The corrected absorbances (“H” row background value subtracted) obtained at 490nm were plotted versus concentration of cytokine. The ED50 value was calculated by determining the X-axis value corresponding to one-half the difference between the maximum and minimum absorbance values. (ED50=the concentration of cytokine necessary to give one-half the maximum response).

[0387] D.3 Treatment of IFN α-2b with Proteolytic Preparations

[0388] Mutants were treated with proteases in order to identify resistant molecules. The resistance of the mutant IFN α-2b molecules compared to wild-type IFN α-2b against enzymatic cleavage (30 min, 25° C.) by a mixture of proteases (containing 1.5 pg of each of the following proteases (1% wt/wt, Sigma): α-chymotrypsin, carboxypeptidase, endoproteinase Arg-C, endoproteinase Asp-N, endoproteinase Glu-C, endoproteinase Lys-C, and trypsin) was determined. At the end of the incubation time, 10 μl of anti-proteases complete, mini EDTA free, Roche (one tablet was dissolved in 10 ml of DMEM and then diluted to 1/1000) was added to each reaction in order to inhibit protease activity. Treated samples were then used to determine residual antiviral or antiproliferation activities.

[0389] D.4 Protease Resistance—Kinetic Analysis

[0390] The percent of residual IFN α-2b activity over time of exposure to proteases was evaluated by a kinetic study using either (a) 15 pg of chymotrypsin (10% wt/wt), (b) a lysate of human blood at dilution 1/100, (c) 1.5 pg of protease mixture, or (d) human serum. Incubation times were: 0 h, 0.5 h, 1 h, 4 h, 8 h, 16 h, 24 h and 48 h. Briefly, 20 μl of each proteolytic sample (proteases, serum, bnlood) was added to 100 μl of IFN α-2b at 1500 pg/ml (500U/ml) and incubated for variable times, as indicated. At the appropriate time points, 10 μl of anti-proteases mixture, mini EDTA free, Roche (one tablet was dissolved in 10 ml of DMEM and then diluted to 1/500) was added to each well in order to stop proteolysis reactions. Biological activity assays were then performed as described for each sample in order to determine the residual activity at each time point.

[0391] D.5 Performance

[0392] The various biological activities, protease resistance and potency of each individual mutant were analyzed using a mathematical model and algorithm (NautScan™; described in French Patent No. 9915884; (published as International PCT application No. WO 01/44809 based on PCT n^{o} PCT/FR00/03503). Data was processed using a Hill equation-based model that uses key feature indicators of the performance of each individual mutant. Mutants were ranked based on the values of their individual performance and those on the top of the ranking list were selected as leads.

E. Pharmacokinetics of Selected Lead Mutants in Mice

[0393] IFNα-2b mutants selected on the basis of their overall performance in vitro, were tested for pharmacokinetics in mice in order to have an indication of their half-life in blood in vivo. Mice were treated by subcutaneous (SC) injection with alicuots of each of a number of selected lead mutants. Blood was collected at increasing time points between 0.5 and 48 hs after injection. Immediately after collection, 20 ml of anti-protease solution were added to each blood sample. Serum was obtained for further analysis.Residual IFN-α activity in blood was determined using the tests described in the precedent sections for in vitro characterization. Wild-type IFN α (that had been produced in bacteria under comparable conditions as the lead mutants) as well as a pegylated derivative of IFN α, Pegasys (Roche), also were tested for pharmacokinetics in the same experiments.

### Example 2

[0394] This example demonstrates the 2-dimensional (2D)scanning of IFNα-2b for increased resistance to proteolysis.
[0395] A) Identifying some or all possible target sites on the protein sequence that are susceptible to digestion by one or more specific proteases (these sites are the is-HITs).

[0396] Because IFNα-2b is administered as a therapeutic protein in the blood stream, a set of proteases was identified that were expected to broadly mimic the protease contents in serum. From that list of proteases, a list of the corresponding target amino acids was identified (shown in parenthesis) as follows: α-chymotrypsin (F, L, M, W, and Y), endoproteinase Arg-C (R), endoproteinase Asp-N (D), endoproteinase Glu-C (E), endoproteinase Lys-C (K), and trypsin (K and R) Carboxypeptidase Y, which cleaves non-specifically from the carboxy-terminal ends of proteins, was also included in the protease mixture. The distribution of the target amino acids over the protein sequence spreads over the complete length of the protein, suggesting that the protein is potentially sensitive to protease digestion all over its sequence (FIG. 6A). In order to restrict the number of is-HITs to a lower number of candidate positions, the 3-dimensional structure of the IFNα-2b molecule (PDB code 1 RH2) was used to identify and select only those residues exposed on the surface, while discarding from the candidate list those which remain buried in the structure, and therefore stay less susceptible to proteolysis (FIG. 6B).
[0397] B) Identifying appropriate replacing amino acids, specific for each is-HIT, such that if used to replace one or more of the original, such as native, amino acids at that specific is-HIT, they can be expected to increase the is-HIT amino acid position's resistance to digestion by protease while at the same time, maintaining or improving the requisite biological activity of the protein (these replacing amino acids are the “candidate LEADs”).

[0398] To select the candidate replacing amino acids for each is-HIT position, PAM250 matrix based analysis was used (FIG. 7). In one embodiment, the two highest values in PAM250 matrix, corresponding to the highest occurrence of substitutions between residues (“conservative substitutions” or “accepted point mutations”), were chosen (FIG. 8). Whenever only a conservative substitution was available for a given high value of the PAM250, the following higher value was selected and the totality of conservative substitutions for this value was considered. The replacement of amino acids that are exposed on the surface by cysteine residues (as shown in FIG. 8, while replacing Y by H or I) was explicitly avoided, since this change would potentially lead to the formation of intermolecular disulfide bonds.

[0399] Thus, based on the nature of the challenging proteases, and on evolutionary considerations as well as protein structural analysis, a strategy was defined for the rational design of human IFNα-2b mutants having increased resistance to proteolysis which could produce therapeutic proteins having a longer half-life. By using the algorithm PROTEOL (see, e.g.,infobiogen.fr), a list of residues along the IFNα-2b sequence was established, which can be recognized as a substrate for different enzymes present in the serum. Because the number of residues in this particular list was high, the 3-dimensional structure of IFNα-2b obtained from the NMR structure of IFNα-2a (PDB code 1ITF) was used to select only those residues exposed to the solvent. Using this approach, 42 positions were identified, which numbering is that of the mature protein (SEQ ID NO:1): L3, P4, R12, R13, M16, R22, K23, F27, L30, K31, R33, E41, K49, E58, K70, E78, K83, Y89, E96, E107, P109, L 110, M111, E113, L117, R120, K121, R125, L128, K131, E132, K133, K134, Y135, P137, M148, R149, E159, L161, R162, K164, and E165. Each of these positions was replaced by amino acid residues, such that they are defined as compatible by the substitution matrix PAM250 while at the same time the replacement amino acids do not generate new sites for proteases.

[0400] The list of performed residue substitutions as determined by PAM250 analysis is as follows:

[0401] R to H, Q

[0402] E to H, Q

[0403] K to Q, T

[0404] L to V, I

[0405] M to I, V

[0406] P to A, S

[0407] Y to I, H
[0408] C) Systematically introducing the specific replacing amino acids (candidate LEADs) at every specific is-HIT position to generate a collection containing the corresponding mutant molecules.

[0409] The individual IFNα-2b mutants are generated, produced and phenotypically characterized one-by-one, in addressable arrays as set forth in Example 1, such that each mutant molecule contains initially amino acid replacements at only one is-HIT site. LEAD positions were obtained in IFNα-2b variants after a screening for protection against proteases, and comparing protease-untreated and protease-treated variant preparations with the corresponding conditions for the wild-type IFNα-2b. The percent of residual (anti-viral) activity for the IFNα-2b E113H variant after treatment with chymotrypsin, protease mixture, blood lysate or serum was compared to the treated wild-type IFNα-2b. Selected IFNα-2b LEADs are shown in Table 2.

[0410] A top and side view of IFNα-2b structure in ribbon representation (obtained from NMR structure of IFNα-2b, PDB code 1ITF) depict residues in “space filling” defining (1) the “receptor binding region” as deduced either by “alanine scanning” data and studies by Piehler et al., J. Biol. Chem., 275:40425-40433, 2000, and Roisman et al., Proc. Natl. Acad. Sci USA, 98:13231-13236, 2001, and (2) replacing residues (LEADs) for resistance to proteolysis.

TABLE 2
Selected LEADs of IFNα-2b following protease resistance

| | | Proteolysis | IFN antiviral |
|---|---|---|---|
| Mutant | SEQ ID No. | protection | activity |
| F27V | 83 | Pseudo wt | Pseudo wt |
| R33H | 86 | Pseudo wt | Pseudo wt |
| E41Q | 87 | Increased | Increased |
| E41H | 88 | Pseudo wt | Increased |
| E58Q | 89 | Increased | Pseudo wt |
| E58H | 90 | Increased | Increased |
| E78Q | 92 | Increased | Increased |
| E78H | 93 | Increased | Increased |
| Y89H | 196 | Pseudo wt | Pseudo wt |
| E107Q | 95 | Increased | Pseudo wt |
| E107H | 96 | Increased | Pseudo wt |
| P109A | 97 | Pseudo wt | Pseudo wt |
| L110V | 98 | Pseudo wt | Pseudo wt |
| M111V | 197 | Pseudo wt | Pseudo wt |
| E113H | 101 | Increased | Pseudo wt |
| L117V | 102 | Increased | Pseudo wt |
| L117I | 103 | Increased | Pseudo wt |
| K121Q | 104 | Increased | Pseudo wt |
| R125H | 106 | Increased | Increased |
| R125Q | 107 | Increased | Increased |
| K133Q | 114 | Increased | Increased |
| E159H | 125 | Increased | Pseudo wt |
| E159Q | 124 | Increased | Pseudo wt |

### Example 3

### Stabilization of IFNα-2b by Creation of N-Glycosylation Sites

[0411] The creation of N-glycosylation sites on the protein was a second strategy that was used to stabilize IFNα-2b Natural human IFNα-2b contains a unique 0-glycosylation site at position 129 (the numbering corresponds to the mature protein; SEQ ID NO:1), however, no N-glycosylation sites are found in this sequence. N-glycosylation sites are defined by the N-X-S or N-X-T consensus sequences. Glycosylation has been found to play a role in protein stability. For example, glycosylation has been found to increase bioavailability via higher metabolic stability and reduced clearance. In order to generate more stable IFNα-2b variants, the N-glycosylation consensus sequences indicated above were introduced in the IFNα-2b sequence by mutagenesis. Variants of IFNα-2b carrying new glycosylation sites were assessed as previously described.

[0412] The structure of IFNα-2b is characterized by a helix bundle composed of 5 helices (A, B, C, D and E) connected with each other by a series of loops (a large AB loop and three shorter BC, CD, DE loops). The helices are joined together by two disulfide bridges between residues 1/98 and 29/138 of SEQ ID NO:1. The loops are contemplated herein to represent preferential sites for glycosylation given their exposure. Therefore, N-glycosylation sites (N-X-S or N-X-T) were created in each of the loop sequences (Table 3). Selected LEADs and pseudo wild-type IFNα-2b mutants after screening for addition of glycosylation sites are shown in Table 4.

TABLE 3
In silico HITs for addition of glycosylation sites on IFNα-2b

| | SEQ ID | | SEQ ID | |
|---|---|---|---|---|
| Codon No. | No. | N-X-S | No. | N-X-T |
| c2-4 | | D2N/P4S | | D2N/P4T |
| c3-5 | | L3N/Q5S | | L3N/Q5T |
| c4-6 | | P4N/T6S | | P4N/T6T |
| c5-7 | 127 | Q5N/H7S | 128 | Q5N/H7T |
| c6-8 | 129 | T6N/S8S | | T6N/S8T |
| c7-9 | | H7N/L9S | | H7N/L9T |
| c8-10 | 130 | S8N/G10S | 131 | S8N/G10T |
| c9-11 | | L9N/S11S | | L9N/S11T |
| c10-12 | 132 | M21N/R23S | | M21N/R23T |
| c22-24 | | R22N/I24S | | R22N/I24T |
| c23-25 | | R23N/S25S | 133 | R23N/S25T |
| c24-26 | 134 | I24N/L26S | | I24N/L26T |
| c25-27 | 135 | S25N/F27S | 136 | S25N/F27T |
| c26-28 | 137 | L26N/S28S | 138 | L26N/S28T |
| c28-30 | | S28N/L30S | | S28N/L30T |
| c30-32 | 139 | L30N/D32S | | L30N/D32T |
| c31-33 | | K31N/R33S | | K31N/R33T |
| c32-34 | | D32N/H34S | | D32N/H34T |
| c33-35 | 140 | R33N/D35S | 141 | R33N/D35T |
| c34-36 | 142 | H34N/F36S | 143 | H34N/F36T |
| c35-37 | 144 | D35N/G37S | | D35N/G37T |
| c36-38 | 145 | F36N/F38S | 146 | F36N/F38T |
| c37-39 | 147 | G37N/P39S | | G37N/P39T |
| c38-40 | 148 | F38N/Q40S | 149 | F38N/Q40T |
| c39-41 | 150 | P39N/E41S | 151 | P39N/E41T |
| c40-42 | 152 | Q40N/E42S | 153 | Q40N/E42T |
| c41-43 | | E41N/F43S | 155 | E41N/F43T |
| c42-44 | | E42N/G44S | | E42N/G44T |
| c43-45 | | F43N/N45S | | F43N/N45T |
| c44-46 | 156 | G44N/Q46S | 157 | G44N/Q46T |
| c45-47 | 158 | N45N/F47S | 159 | N45N/F47T |
| c46-48 | 160 | Q46N/Q48S | 161 | Q46N/Q48T |
| c47-49 | 162 | F47N/K49S | 163 | F47N/K49T |
| c48-50 | | Q48N/A50S | | Q48N/A50T |
| c49-51 | 164 | K49N/E51S | | K49N/E51T |
| c50-52 | | A50N/T52S | | A50N/T52T |
| c68-70 | | S68N/K70S | | S68N/K70T |
| c70-72 | | K70N/S72S | | K70N/S72T |
| c75-77 | 165 | A75N/D77S | | A75N/D77T |
| c77-79 | | D77N/T79S | | D77N/T79T |
| C100-102 | 166 | I100N/G102S | 167 | I100N/G102T |
| C101-103 | | Q101N/V103S | | Q101N/V103T |
| C102-104 | | G102N/G104S | | G102N/G104T |
| C103-105 | 168 | V103N/V105S | 169 | V103N/V105T |
| C104-106 | | G104N/T106S | 170 | G104N/T106T |
| C105-107 | 171 | V105N/E107S | | V105N/E107T |
| C10--108 | 172 | T106N/T108S | 173 | T106N/T108T |
| C107-109 | 174 | E107N/P109S | 175 | E107N/P109T |
| C108-110 | | T108N/I110S | | T108N/I110T |
| C134-136 | | K134N/S136S | 176 | K134N/S136T |
| C154-156 | | S154N/N156S | | S154N/N156T |
| C155-157 | | T155N/L157S | | T155N/L157T |
| C156-158 | | N156N/Q158S | | N156N/Q158T |
| C157-159 | 177 | L157N/E159S | 178 | L157N/E159T |
| C158-160 | | Q158N/S160S | 179 | Q158N/S160T |
| C159-161 | 180 | E159N/L161S | 181 | E159N/L161T |
| C160-162 | | S160N/R162S | | S160N/R162T |
| C161-163 | | L161N/S163S | | L161N/S163T |
| C162-164 | | R162N/K164S | | R162N/K164T |
| C163-165 | | S163N/E165S | | S163N/E165T |

[0413] TABLE 4
Selected LEADs and pseudo wild-type IFNα-2b mutants
after screening for addition of glycosylation sites

| | | Proteolysis | IFN antiviral |
|---|---|---|---|
| Mutant | SEQ ID No. | protection | activity |
| Q5N/H7S | 127 | Increased | Pseudo wt |
| Q5N/H7T | 128 | ND* | ND |
| P39N/E41S | 150 | Increased | Pseudo wt |
| P39N/E41T | 151 | Increased | Pseudo wt |
| Q40N/E42S | 152 | Increased | Pseudo wt |
| Q40N/E42T | 153 | Increased | Pseudo wt |
| E41N/F43S | 154 | Increased | Pseudo wt |
| E41N/F43T | 155 | Increased | Pseudo wt |
| F43N/N45S | | Increased | Pseudo wt |
| F43N/N45T | | ND | ND |
| G44N/Q46S | 156 | ND | ND |
| G44N/Q46T | 157 | Increased | Pseudo wt |
| N45N/F47S | 158 | Increased | Pseudo wt |
| N45N/F47T | 159 | Increased | Pseudo wt |
| Q46N/Q48S | 160 | Increased | Pseudo wt |
| Q46N/Q48T | 161 | ND | ND |
| F47N/K49S | 162 | Increased | Pseudo wt |
| F47N/K49T | 163 | Increased | Pseudo wt |
| I100N/G102S | 166 | Pseudo wt | Increased |
| I100N/G102T | 167 | Pseudo wt | Increased |
| V105N/E107S | 171 | Pseudo wt | Increased |
| V105N/E107T | | Pseudo wt | Increased |
| T106N/T108S | 172 | Pseudo wt | Increased |
| T106N/T108T | 173 | Pseudo wt | Increased |
| E107N/P109S | 174 | Pseudo wt | Increased |
| E107N/P109T | 175 | Pseudo wt | Increased |
| L157N/E159S | 177 | Pseudo wt | Increased |
| L157N/E159T | 178 | Pseudo wt | Increased |
| E159N/L161S | 180 | Pseudo wt | Increased |
| E159N/L161T | 181 | Pseudo wt | Increased |

*ND, not determined

### Example 4

### Redesign of Interferon α-2b Proteins

[0414] The use of the protein redesign approach provided herein permits the generation of proteins such that they maintain requisite levels and types of biological activity compared to the native protein while their underlying amino acid sequences have been significantly changed by amino acid replacement. To first identify those amino acid positions on the IFNα-2b protein that are involved or not involved IFNα-2b protein activity, such as binding activity of IFNα-2b to its receptor, an Ala-scan was performed on the IFNα-2b sequence. For this purpose, each amino acid in the IFNα-2b protein sequence was individually changed into Alanine. Any other amino acid, particularly another amino acid that has a neutral effect on structure, such as Gly or Ser, also can be used. Each resulting mutant IFNα-2b protein was then expressed and the antiviral activity of the individual mutants was assayed. The particular amino acid positions that are sensitive to replacement by Ala, referred to herein as HITs would in principle not be suitable targets for amino acid replacement to increase protein stability, because of their involvement in the activity of the molecule. For the Ala-scanning, the biological activity measured for the IFNα-2b molecules was: i) their capacity to inhibit virus replication when added to permissive cells previously infected with the appropriate virus and, ii) their capacity to stimulate cell proliferation when added to the appropriate cells. The relative activity of each individual mutant compared to the native protein was assayed. HITS are those mutants that produce a decrease in the activity of the protein (e.g., in this example, all the mutants with activities below about 30% of the native activity).

[0415] In addition, to identify the HIT positions, the Alanine-scan was used to identify the amino acid residues on IFNα-2b that when replaced with alanine lead to a ‘pseudo-wild type’ activity, i.e., those that can be replaced by alanine without leading to a decrease in biological activity.

[0416] A collection of mutant molecules was generated and phenotypically characterized such that IFNα-2b proteins with amino acid sequences different from the native ones but that still elicit the same level and type of activity as the native protein were selected. HITs and pseudo wild-type amino acid positions are shown in Table 5.

TABLE 5
HITs and pseudo wild-type positions to IFNα-2b redesign

| | | HITs | Pseudo wt |
|---|---|---|---|
| Mutants | SEQ ID No. | (viral activity) | (viral activity) |
| D2A | 2 | Decreased | |
| P4A | 3 | | Pseudo wt |
| Q5A | 4 | | Pseudo wt |
| T6A | 5 | | Pseudo wt |
| H7A | 6 | Decreased | |
| S8A | 7 | Decreased | |
| L9A | 8 | | Pseudo wt |
| G10A | 9 | | Pseudo wt |
| S11A | 10 | Decreased | |
| R12A | 11 | Decreased | |
| R13A | 12 | Decreased | |
| T14A | 13 | Decreased | |
| L15A | 14 | Decreased | |
| M16A | 15 | Decreased | |
| L17A | 16 | | Pseudo wt |
| Q20A | 17 | | Pseudo wt |
| R23A | 18 | Decreased | |
| I24A | 19 | | Pseudo wt |
| S25A | 20 | | Pseudo wt |
| L26A | 21 | Decreased | |
| S28A | 22 | Decreased | |
| C29A | 23 | Decreased | |
| L30A | 24 | Decreased | |
| K31A | 25 | Decreased | |
| D32A | 26 | Decreased | |
| R33A | 27 | Decreased | |
| D35A | 28 | | Pseudo wt |
| G37A | 29 | | Pseudo wt |
| G39A | 30 | | Pseudo wt |
| E41A | 31 | | Pseudo wt |
| E42 | 32 | | Pseudo wt |
| F43A | 33 | Decreased | |
| N45A | 34 | Decreased | |
| F47A | 35 | Decreased | |
| E51A | 36 | | Pseudo wt |
| T52A | 37 | | Pseudo wt |
| I53A | 38 | Decreased | |
| P54A | 39 | | Pseudo wt |
| V55A | 40 | | Pseudo wt |
| L56A | 41 | | Pseudo wt |
| H57A | 42 | | Pseudo wt |
| E58A | 43 | | Pseudo wt |
| M59A | 44 | Decreased | |
| I60A | 45 | | Pseudo wt |
| I63A | 46 | | Pseudo wt |
| F64A | 47 | | Pseudo wt |
| N65A | 48 | | Pseudo wt |
| L66A | 49 | Decreased | |
| F67A | 50 | Decreased | |
| T69A | 51 | Decreased | |
| K70A | 52 | Decreased | |
| D71A | 53 | Decreased | |
| S72A | 54 | Decreased | |
| W76A | 55 | | Pseudo wt |
| D77A | 56 | | Pseudo wt |
| E78A | 57 | | Pseudo wt |
| L81A | 58 | | Pseudo wt |
| D82A | 59 | Decreased | |
| K83A | 60 | Decreased | |
| F84A | 61 | Decreased | |
| Y85A | 62 | | Pseudo wt |
| Y89A | 63 | | Pseudo wt |
| Q90A | 64 | | Pseudo wt |
| Q91 | 65 | Decreased | |
| N93A | 66 | Decreased | |
| D94A | 67 | Decreased | |
| C98A | 68 | Decreased | |
| V99A | 69 | Decreased | |
| Q101A | 207 | Decreased | |
| G104A | 70 | | Pseudo wt |
| L110A | 71 | | Pseudo wt |
| S115A | 72 | | Pseudo wt |
| Y122A | 73 | Decreased | |
| W140A | 74 | Decreased | |
| E146A | 75 | | Pseudo wt |

### Example 5

[0417] Super LEADS of Interferon α-2b Protein by Additive Directional Mutagenesis

[0418] The use of an additive directional mutagenesis approach provided a method for the assembly of multiple mutations previously present on the individual LEAD molecules in a single mutant protein thereby generating super-LEAD mutant proteins. In this method, a collection of nucleic acid molecules encoding a library of new mutant molecules is generated, tested and phenotypically characterized one-by-one in addressable arrays. Super-LEAD mutant molecules are such that each molecule contains a variable number and type of LEAD mutations

[0419] Using the LEADs obtained in Example 2, six series of mutant molecules were generated with more than one mutation per molecule as shown in Table 6. Some SuperLEAD mutant molecules were phenotypically characterized and the results are shown in Table 7. As shown in the table not all SuperLEADS have improved activity compared with the original Leads; some showed decreased activity of some type.

[0420] Table 6

Schema of LEADs position for SuperLEADS generation

Series 1

[0421] m1=E41H

[0422] m1+m2=E41H+Y89H

Series 2

[0423] m1=E58Q

[0424] m1+m2=E58Q+F27V

Series 3

[0425] m1=R125H

[0426] m1+m2=R125H+M111V

Series 4

[0427] m1=E159H

[0428] m1+m2=E159H+Y89H

Series 5

[0429] m1=K121Q

[0430] m1+m2=K121Q +P109A

[0431] m1+m2+m3=K121Q+P109A+K133Q

Series 6

[0432] m1=E78H

[0433] m1+m2=E78H+R33H

[0434] m1+m2+m3=E78H+R33H+E58H

[0435] m1+m2+m3+m4=E78H+R33H+E58H+L110V

TABLE 7
SuperLEADs of IFNα-2b multiple mutants

| | SEQ ID | Proteolysis | IFN antiviral |
|---|---|---|---|
| Mutant | No. | protection | activity |
| E41H | 88 | Pseudo wt | Increased |
| Y89H | 196 | Pseudo wt | Pseudo wt |
| E41H/Y89H/ | 198 | Increased | Increased |
| N45D** | | | |
| E58Q | 89 | Increased | Pseudo wt |
| F27V | 83 | Pseudo wt | Pseudo wt |
| E58Q/F27V | 200 | Increased | Pseudo wt |
| R125H | 106 | Increased | Increased |
| M111V | 197 | Pseudo wt | Pseudo wt |
| R125H/ | 205 | Increased | Increased |
| M111V | | | |
| E159H | 125 | | |
| Y89H | 196 | | |
| E159H/Y89H | 206 | | |
| K121Q | 104 | Increased | Pseudo wt |
| P109A | 97 | Pseudo wt | Pseudo wt |
| K133Q | 114 | Increased | Increased |
| K121Q/ | 202 | Increased | Pseudo wt |
| P109A | | | |
| K121Q/ | 203 | Increased | Increased |
| P109A/ | | | |
| K133Q/ | | | |
| G102R** | | | |
| E78H | 93 | Increased | Increased |
| R33H | 86 | Pseudo wt | Pseudo wt |
| E58H | 89 | Increased | Increased |
| L110V | 98 | Pseudo wt | Pseudo wt |
| E78H/R33H/ | 201 | Decreased | Decreased |
| E58H/L110V | | | |

[0436] Four mutants with additional mutations to those selected by the rational mutagenesis were generated in the E. coli MutS strain and were detected by sequencing. The mutants were the following: E41Q/D94G SEQ.ID No. 199; L 117V/A139G SEQ.ID No. 204; E41 H/Y89H/ N45D SEQ.ID No. 198; and K121Q/P109A/K133Q/G102R SEQ.ID No. 204.

### Example 6

### Cloning of IFN β in pNAUT, a Mammalian Cell Expression Plasmid

[0437] The cDNA encoding IFN β (see, SEQ ID No. 499) was cloned into a mammalian expression vector, prior to the generation of the selected mutations. A collected of predesigned, targeted mutants was then generated such that each individual mutant was created and processed individually, physically separated form each other and in addressable arrays. The mammalian expression vector pSSV9 CMV 0.3 pA (see, Example 1) was engineered as follows:

[0438] The pSSV9 CMV 0.3 pA was cut by PvuIl and religated (this step gets rid of the ITR functions), prior to the introduction of a new EcoRI restriction site by Quickchange mutagenesis (Stratagene). The oligonucleotides sequences used, follow:

EcoRi forward primer:

(SEQ ID NO: 182)

5′-GCCTGTATGATTTATTGGATGT-
TGGAATTCC-CTGATGCGGTATTTTCTCCTTACG-3′
EcoRi reverse prime:

(SEQ ID NO: 183)

5′-CGTAAGGAGAAAATACCGCATCA-
GGGAATT-CCAACATCCAATAAATCATACAGGC-3′

[0439] The construct sequence was confirmed by using the following oligonucleotides:

Seq ClaI forward primer:

(SEQ ID NO: 184)

5′-CTGATTATCAACCGGGGTACATAT-GATTGAC-ATGC-3′
Seq XmnI reverse primer:

(SEQ ID NO: 185)

5′-TACGGGATAATACCGCGCCACATA-GCAGAA-C-3′.

[0440] Then, the XmnI-ClaI fragment containing the newly introduced EcoRI site was cloned into pSSV9 CMV 0.3 pA to replace the corresponding wild-type fragment and produce construct pSSV9-2EcoRI.

[0441] The IFN β-cDNA was obtained from the pIFNβ (ATCC) construct. The sequence of the IFN β-cDNA was confirmed by sequencing using the primers below:

(SEQ ID NO: 186)

| | |
|---|---|
| Seq forward primer: | 5′-CCTGATGAAGGAGGACTC-3′ |

(SEQ ID NO: 187)

| | |
|---|---|
| Seq reverse primer: | 5′-CCAAGCAGCAGATGAGTC-3′. |

[0442] The verified IFN β-encoding cDNA first was cloned into the pTOPO-TA vector (Invitrogen). After checking of the cDNA sequence by automatic DNA sequencing, the HindIII-XbaI fragment containing the IFN cDNA was subcloned into the corresponding sites of pSSV9-2EcoRI, leading to the construct pAAV-EcoRI-IFNbeta (pNB-AAV-IFN beta) Finally the fragment Pvu II of plasmid pNB-AAV-IFN beta was subcloned in PvuII site of pUC 18 leading the final construct pUC-CMVIFNbetapA called pNAUT-IFNbeta

Production and Normalization of IFNβ in Mammalian Cells

[0443] IFN β was produced in CHO Chinese Hamster Ovarian cells (obtained from ATCC), using Dubelcco's modified Eagle's medium supplemented with glucose (4.5 g/L; Gibco-BRL) and fetal bovine serum (5%, Hyclone). Cells were transiently transfected as follows: 0.6×10⁵ cells were seeded into 6 well plates and grown for 24 h before transfection. Confluent cells at about 70%, were supplemented with 1.0 μg of plasmid (from the library of IFN β mutants) by lipofectamine plus reagent (Invitrogen). After gently shaking, cells were incubated for 24 h with 1 ml of culture medium supplemented with 1% of serum. IFN β was obtained from culture supernatants 24 h after transfection and stored in aliquots at −80° C. until use.

[0444] Preparations of IFN β produced from transfected cells were screened following sequential biological assays as follows. Normalization of IFN β concentration from culture supernatants was performed by ELISA. IFN β concentrations from wild type, and mutants samples were estimated by using an international reference standard provided by the NIBSC, UK.

Screening and In Vitro Characterization of IFN β mutants

[0445] Two activities were measured directly on IFN samples: antiviral and antiproliferation activities. Dose (concentration)—response (activity) experiments for antiviral or antiproliferation activity allowed for the calculation of the ‘potency’ for antiviral and antiproliferation activities, respectively. Antiviral and antiproliferation activities also were measured after incubation with proteolytic samples such as specific proteases, mixtures of selected proteases, human serum or human blood. Assessment of activity following incubation with proteolytic samples allowed to determine the residual (antiviral or antiproliferation) activity and the respective kinetics of half-life upon exposure to proteases

Antiviral Activity—Measured by Cytopathic Effects (CPE)

[0446] Antiviral activity of IFN β was determined by the capacity of the cytokine to protect Hela cells against EMC (mouse encephalomyocarditis) virus-induced cytopathic effects. The day before, Hela cells (2×10⁵ cells/ml) were seeded in flat-bottomed 96-well plates containing 100 μl/well of Dulbecco's MEM-Glutamaxl-sodium pyruvate medium supplemented with 5% SVF and 0.2% of gentamicin. Cells were growth at 37° C. in an atmosphere of 5% CO₂ for 24 hours Two-fold serial dilutions of interferon samples were made with MEM complete media into 96-Deep-Well plates with final concentration ranging from 1600 to 0.6 pg/ml. The medium was aspirated from each well and 100 μl of interferon dilutions were added to Hela cells. Each interferon sample dilution was assessed in triplicate. The two last rows of the plates were filled with 100 μl of medium without interferon dilution samples in order to serve as controls for cells with and without virus.

[0447] After 24 hours of growth, a 1/1000 EMC virus dilution solution was placed in each well, except for the cell control row. Plates were returned to the CO₂ incubator for 48 hours. Then, the medium was aspirated and the cells were stained for 1 hour with 100 μl of Blue staining solutio to determine the proportion of intact cells. Plates were washed in a distilled water bath. The cell bound dye was extracted using 100 μl of ethylene-glycol mono-ethyl-ether (Sigma). The absorbance of the dye was measured using an Elisa plate reader (Spectramax). The antiviral activity of IFN β samples (expressed as number of IU/mg of proteins) was determined as the concentration needed for 50% protection of the cells against EMC virus-induced cytopathic effects. For proteolysis experiments, each point of the kinetic was assessed at 800 and 400 pg/ml in triplicate.

Anti-proliferative Activity

[0448] Anti-proliferative activity of IFN β was determined by assessing the capacity of the cytokine to inhibit proliferation of Daudi cells. Daudi cells (1×10⁴ cells) were seeded in flat-bottomed 96-well plates containing 50μl/well of RPMI 1640 medium supplemented with 10% SVF, 1×glutamine and 1 ml of gentamicin. No cell was added to the last row (“H” row) of the flat-bottomed 96-well plates in order to evaluate background absorbance of culture medium.

[0449] At the same time, two-fold serial dilutions of interferon samples were made with RPMI 1640 complete media into 96-Deep-Well plates with final concentration ranging from 6000 to 2.9 pg/ml. Interferon dilutions (50 μl) were added to each well containing 50 μl of Daudi cells. The total volume in each well should now be 100 μl. Each interferon sample dilution was assessed in triplicate. Each well of the “G” row of the plates was filled with 50 μl of RPMI 1640 complete media in order to be used as positive control. The plates were incubated for 72 hours at 37° C. in a humidified, 5% CO2 atmosphere.

[0450] After 72 hours of growth, 20 μl of Cell titer 96 Aqueous one solution reagent (Promega) was added to each well and incubated 1H30 at 37° C. in an atmosphere of 5% CO₂. To measure the amount of colored soluble formazan produced by cellular reduction of the MTS, the absorbance of the dye was measured using an Elisa plate reader (spectramax) at 490 nm.

[0451] The corrected absorbances (“H” row background value subtracted) obtained at 490 nm were plotted versus concentration of cytokine. The ED50 value was calculated by determining the X-axis value corresponding to one-half the difference between the maximum and minimum absorbance values. (ED50=the concentration of cytokine necessary to give one-half the maximum response).

Treatment of IFN β with Proteolytic Preparations

[0452] Mutants were treated with proteases in order to identify resistant molecules. The resistance of the mutant IFN βmolecules compared to wild-type IFN β against enzymatic cleavage (120 min, 25° C.) by a mixture of proteases (containing 1.5 pg of each of the following proteases (1% wt/wt, Sigma): α-chymotrypsin, carboxypeptidase, endoproteinase Arg-C, endoproteinase Asp-N, endoproteinase Glu-C, endoproteinase Lys-C, and trypsin) was determined. At the end of the incubation time, 10 μl of anti-proteases complete, mini EDTA free, Roche (one tablet was dissolved in 10 ml of DMEM and then diluted to 1/1000) was added to each reaction in order to inhibit protease activity. Treated samples were then used to determine residual antiviral or antiproliferation activities.

Protease resistance—Kinetic analysis

[0453] The percent of residual IFN β activity over time of exposure to proteases was evaluated by a kinetic study using 1.5 pg of protease mixture. Incubation times were: 0 h, 0.5 h, 2 h, 4 h, 8 h, 12 h, 24 h and 48 h. Briefly, 20 μl of each proteolytic sample (proteases, serum, bnlood) was added to 100 μl of IFN β at 400 and 800 pg/ml and incubated for variable times, as indicated. At the appropriate time points, 10 μl of anti-proteases mixture, mini EDTA free, Roche (one tablet was dissolved in 10 ml of DMEM and then diluted to 1/500) was added to each well in order to stop proteolysis reactions. Biological activity assays were then performed as described for each sample in order to determine the residual activity at each time point.

Performance

[0454] The various biological activities, protease resistance and potency of each individual mutant were analyzed using a mathematical model and algorithm (NautScan™; Fr. Patent No. 9915884; see, also published International PCT application No. WO 01/44809 based on PCT n^{o} PCT/FR00/03503). Data was processed using a Hill equation-based model that uses key feature indicators of the performance of each individual mutant. Mutants were ranked based on the values of their individual performance and those on the top of the ranking list were selected as leads.

[0455] Using the 2D-scanning and 3D-scanning methods described above in addition to the 3-dimensional structure of IFNβ the following amino acid target positions were identified as is-HITs on IFNβ which numbering is that of the mature protein (SEQ ID NO:499):

[0456] By 3D-scanning: D by Q at position 39, D by H at position 39, D by G at position 39, E by Q at position 42, E by H at position 42, K by Q at position 45, K by T at position 45, K by S at position 45, K by H at position 45, L by V at position 47, L by I at position 47, L by T at position 47, L by Q at position 47, L by H at position 47, L by A at position 47, K by Q at position 52, K by T at position 52, K by S at position 52, K by H at position 52, F by I at position 67, F by V at position 67, R by H at position 71, R by Q at position 71, D by H at position 73, D by G at position 73, D by Q at position 73, E by Q at position 81, E by H at position 81, E by Q at position 107, E by H at position 107, K by Q at position 108, K by T at position 108, K by S at position 108, K by H at position 108, E by Q at position 109, E by H at position 109, D by Q at position 110, D by H at position 110, D by G at position 110, F by I at position 111, F by V at position 111, R by H at position 113, R by Q at position 113, L by V at position 116, L by I at position 116, L by T at position 116, L by Q at position 116, L by H at position 116, L by A at position 116, L by V at position 120, L by I at position 120, L by T at position 120, L by Q at position 120, L by H at position 120, L by A at position 120, K by Q at position 123, K by T at position 123, K by S at position 123, K by H at position 123, R by H at position 124, R by Q at position 124, R by H at position 128, R by Q at position 128, L by V at position 130, L by I at position 130, L by T at position 130, L by Q at position 130, L by H at position 130, L by A at position 130, K by Q at position 134, K by T at position 134, K by S at position 134, K by H at position 134, K by Q at position 136, K by T at position 136, K by S at position 136, K by H at position 136, E by Q at position 137, E by H at position 137, Y by H at position 163, Y by I at position 163I, R by H at position 165, R by Q at position 165.

[0457] By 2D-scanning : M by V at position 1, M by I at position 1, M by T at position 1, M by Q at position 1, M by A at position 1, L by V at position 5, L by I at position 5, L by T at position 5, L by Q at position 5, L by H at position 5, L by A at position 5, F by I at position 8, F by V at position 8, L by V at position 9, L by I at position 9, L by T at position 9, L by Q at position 9, L by H at position 9, L by A at position 9, R by H at position 11, R by Q at position 11, F by I at position 15, F by V at position 15, K by Q at position 19, K by T at position 19, K by S at position 19, K by H at position 19, W by S at position 22, W by H at position 22, N by H at position 25, N by S at position 25, N by Q at position 25, R by H position 27, R by Q position 27, L by V at position 28, L by I at position 28, L by T at position 28, L by Q at position 28, L by H at position 28, L by A at position 28, E by Q at position 29, E by H at position 29, Y by H at position 30, Y by I at position 30, L by V at position 32, L by I at position 32, L by T at position 32, L by Q at position 32, L by H at position 32, L by A at position 32, K by Q at position 33, K by T at position 33, K by S at position 33, K by H at position 33, R by H at position 35, R by Q at position 35, M by V at position 36, M by I at position 36, M by T at position 36, M by Q at position 36, M by A at position 36, D by Q at position 39, D by H at position 39, D by G at position 39, E by Q at position 42, E by H at position 42, K by Q at position 45, K by T at position 45, K by S at position 45, K by H at position 45, L by V at position 47, L by I at position 47, L by T at position 47, L by, Q at position 47, L by H at position 47, L by A at position 47, K by Q at position 52, K by T at position 52, K by S at position 52, K by H at position 52, F by I at position 67, F by V at position 67, R by H at position 71, R by Q at position 71, D by Q at position 73, D by H at position 73, D by G at position 73, E by Q at position 81, E by H at position 81, E by Q at position 85, E by H at position 85, Y by H at position 92, Y by I at position 92, K by Q at position 99, K by T at position 99, K by S at position 99, K by H at position 99, E by Q at position 103, E by H at position 103, E by Q at position 104, E by H at position 104, K by Q at position 105, K by T at position 105, K by S at position 105, K by H at position 105, E by Q at position 107, E by H at position 107, K by Q at position 108, K by T at position 108, K by S at position 108, K by H at position 108, E by Q at position 109, E by H at position 109, D by Q at position 110, D by H at position 110, D by G at position 110, F by I at position 111, F by V at position 111, R by H at position 113, R by Q at position 113, L by V at position 116, L by I at position 116, L by T at position 116, L by Q at position 116, L by H at position 116, L by A at position 116, L by V at position 120, L by I at position 120, L by T at position 120, L by Q at position 120, L by H at position 120, L by A at position 120, K by Q at position 123, K by T at position 123, K by S at position 123, K by H at position 123, R by H at position 124, R by Q at position 124, R by H at position 128, R by Q at position 128, L by V at position 130, L by I at position 130, L by T at position 130, L by Q at position 130, L by H at position 130, L by A at position 130, K by Q at position 134, K by T at position 134, K by S at position 134, K by H at position 134, K by Q at position 136, K by T at position 136, K by S at position 136, K by H at position 136, E by Q at position 137, E by H at position 137, Y by H at position 138, Y by I at position 138, R by H at position 152, R by Q at position 152, Y by H at position 155, Y by I at position 155, R by H at position 159, R by Q at position 159, Y by H at position 163, Y by I at position 163, R by H at position 165, R by Q at position 165, M by D at position 1, M by E at position 1, M by K at position 1, M by N at position 1, M by R at position 1, M by S at position 1, L by D at position 5, L by E at position 5, L by K at position 5, L by N at position 5, L by R at position 5, L by S at position 5, L by D at position 6, L by E at position 6, L by K at position 6, L by N at position 6, L by R at position 6, L by S at position 6, L by Q at position 6, L by T at position 6, F by E at position 8, F by K at position 8, F by R at position 8, F by D at position 8, L by D at position 9, L by E at position 9, L by K at position 9, L by N at position 9, L by R at position 9, L by S at position 9, Q by D at position 10, Q by E at position 10, Q by K at position 10, Q by N at position 10, Q by R at position 10, Q by S at position 10, Q by T at position 10, S by D at position 12, S by E at position 12, S by K at position 12, S by R at position 12, S by D at position 13, S by E at position 13, S by K at position 13, S by R at position 13, S by N at position 13, S by Q at position 13, S by T at position 13, N by D at position 14, N by E at position 14, N by K at position 14, N by Q at position 14, N by R at position 14, N by S at position 14, N by T at position 14, F by D at position 15, F by E at position 15, F by K at position 15, F by R at position 15, Q by D at position 16, Q by E at position 16, Q by K at position 16, Q by N at position 16, Q by R at position 16, Q by S at position 16, Q by T at position 16, C by D at position 17, C by E at position 17, C by K at position 17, C by N at position 17, C by Q at position 17, C by R at position 17, C by S at position 17, C by T at position 17, L by N at position 20, L by Q at position 20, L by R at position 20, L by S at position 20, L by T at position 20, L by D at position 20, L by E at position 20, L by K at position 20, W by D at position 22, W by E at position 22, W by K at position 22, W by R at position 22, Q by D at position 23, Q by E at position 23, Q by K at position 23, Q by R at position 23, L by D at position 24, L by E at position 24, L by K at position 24, L by R at position 24, W by D at position 79, W by E at position 79, W by K at position 79, W by R at position 79, N by D at position 80, N by E at position 80, N by K at position 80, N by R at position 80, T by D at position 82, T by E at position 82, T by K at position 82, T by R at position 82, I by D at position 83, I by E at position 83, I by K at position 83, I by R at position 83, I by N at position 83, I by Q at position 83, I by S at position 83, I by T at position 83, N by D at position 86, N by E at position 86, N by K at position 86, N by R at position 86, N by Q at position 86, N by S at position 86, N by T at position 86, L by D at position 87, L by E at position 87, L by K at position 87, L by R at position 87, L by N at position 87, L by Q at position 87, L by S at position 87, L by T at position 87, A by D at position 89, A by E at position 89, A by K at position 89, A by R at position 89, N by D at position 90, N by E at position 90, N by K at position 90, N by Q at position 90, N by R at position 90, N by S at position 90, N by T at position 90, V by D at position 91, V by E at position 91, V by K at position 91, V by N at position 91, V by Q at position 91, V by R at position 91, V by S at position 91, V by T at position 91, Q by D at position 94, Q by E at position 94, Q by Q at position 94, Q by N at position 94, Q by R at position 94, Q by S at position 94, Q by T at position 94, I by D at position 95, I by E at position 95, I by K at position 95, I by N at position 95, I by Q at position 95, I by R at position 95, I by S at position 95, I by T at position 95, H by D at position 97, H by E at position 97, H by K at position 97, H by N at position 97, H by Q at position 97, H by R at position 97, H by S at position 97, H by T at position 97, L by D at position 98, L by E at position 98, L by K at position 98, L by N at position 98, L by Q at position 98, L by R at position 98, L by S at position 98, L by T at position 98, V by D at position 101, V by E at position 101, V by K at position 101, V by N at position 101, V by Q at position 101, V by R at position 101, V by S at position 101, V by T at position 101, M by C at position 1, L by C at position 6, Q by C at position 10, S by C at position 13, Q by C at position 16, L by C at position 17, V by C at position 101, L by C at position 98, H by C at position 97, Q by C at position 94, V by C at position 91, N by C at position 90.

[0458] Since modifications will be apparent to those of skill in this art, it is intended that this invention be limited only by the scope of the appended claims.

1. A method for generating a protein or peptide molecule, having a predetermined property or activity, the method comprising:
(a) identifying, within a target protein or peptide, one or more target amino acids amenable to providing the evolved predetermined property or activity upon amino acid replacement, wherein each target amino acid is designated an in silico-HIT (is-HIT);
(b) identifying, one or more replacement amino acids, specific for each is-HIT, amenable to providing the evolved predetermined property or activity to the target protein upon amino acid replacement, wherein each single amino acid replacement within the target protein or peptide is designated as a candidate LEAD protein;
(c) producing a collection of sets of nucleic acid molecules that encode each of the candidate LEAD proteins, wherein:
each candidate LEAD protein contains a single amino acid replacement;
each nucleic acid in a set encodes the same candidate LEAD protein that differs by one amino acid from the target protein or peptide;
each set is separate from all other sets;
(d) introducing each set of nucleic acid molecules into a host cells and expressing the encoded candidate LEAD proteins, wherein the host cells are in an addressable array such that each lead protein is expressed at a different locus in the array;
(e) individually screening the sets of encoded candidate LEAD proteins to identify one or more proteins that has an activity that differs from an activity an unmodified target protein, wherein each such protein is designated a LEAD mutant protein.

2. The method of claim 1, wherein the array comprises a solid support with separate loci and each set of cells is at a different locus.

3. The method of claim 2, wherein the loci comprise wells; and each well contains one set of cells.

4. The method of claim 1, wherein the nucleic acid molecules comprise plasmids; and the cells are eukaryotic cells that are transfected with the plasmids or are bacterial cells are transformed with the plasmids.

5. The method of claim 1, wherein the nucleic acid molecules in step (c) are produced by site-specific mutagenesis.

6. The method of claim 1, further comprising:
(f) generating a population of sets of nucleic acid molecules encoding a set of candidate super-LEAD proteins, wherein each candidate super-LEAD protein comprises a combination of two or more of the single amino acid mutations derived from two or more LEAD mutant proteins;
(g) introducing each set of nucleic acid molecules encoding candidate super-LEADs into cells and expressing the encoded candidate super-LEAD proteins; and
(h) individually screening the sets of encoded candidate super-LEAD proteins to identify one or more proteins that has activity that differs from the unmodified target protein and has properties that differ from the original LEADs, wherein each such protein is designated a super-LEAD.

7. The method of claim 6, wherein the nucleic acid molecules in step (f) are produced by a method selected from among Additive Directional Mutagenesis (ADM), multi-overlapped primer extensions, oligonucleotide-mediated mutagenesis, nucleic acid shuffling, recombination, site-specific mutagenesis, and de novo synthesis.

8. The method of claim 1 wherein the is-HITs identified in step (a) correspond to a restricted subset of amino acids along the full length target protein.

9. The method of claim 1, wherein the replacement amino acids identified in step (b) correspond to a restricted subset of the 19 remaining non-native amino acids.

10. The method of claim 1, wherein the nucleic acids of step (c) are produced by systematically replacing each codon that is an is-HIT, with one or more codons encoding a restricted subset of the remaining amino acids, to produce nucleic acid molecules each differing by at least one codon and encoding candidate LEADs.

11. The method of claim 6, wherein the number of LEAD amino acid positions generated on a single nucleic acid molecule is selected from the group consisting of: two, three, four, five, six, seven, eight, nine, ten or more LEAD amino acid positions up to all of the LEAD amino acid positions.

12. The method of claim 1, wherein the change in activity is at least about 10% of the activity of the unmodified target protein.

13. The method of claim 1, wherein the change in activity is not more than about 10%, 20%, 30%, 40%, 50%, 60%, 70%, 80%, 90% or 100%, of the activity of the unmodified target protein.

14. The method of claim 1, wherein the change in activity is at least about 2 times, 3 times, 4 times, 5 times, 6 times, 7 times, 8 times, 9 times, 10 times, 20 times, 30 times, 40 times, 50 times, 60 times, 70 times, 80 times, 90 times, 100 times, 200 times, 300 times, 400 times, 500 times, 600 times, 700 times, 800 times, 900 times, 1000 times, or more greater than the activity of the unmodified target protein.

15. The method of claim 1, wherein the activity modified is selected from among increased catalytic activity, altered substrate and ligand recognition, increased thermostability, increased stability, increased resistance to proteases, increased resistance to glomerular filtration, increased immunogenicity, increased cationization, increased anionization and pseudo wild-type function.

16. The method of claim 1, wherein each is-HIT target amino acid is susceptible to digestion by one or more proteases.

17. The method of claim 16, wherein the LEADs or super-LEADs possess increased resistance to proteolysis compared to unmodified target protein.

18. The method of claim 1, wherein in a modified protein, each is-HIT target amino acid is resistant to digestion by one or more proteases compared to in unmodified protein.

19. The method of claim 18, wherein the LEADs or super-LEADs possess increased digestibility compared to unmodified target protein.

20. The method of claim 1, wherein each is-HIT target amino acid affects protein conformation and/or antigenicity.

21. The method of claim 20, wherein the LEADs or super-LEADs possess either increased or decreased antigenicity compared to unmodified target protein.

22. The method of claim 1, wherein each is-HIT target amino acid affects protein amphipathic properties.

23. The method of claim 22, wherein the LEADs or super-LEADs possess either increased or decreased amphipathic properties compared to unmodified target protein.

24. The method of claim 1, wherein each is-HIT target amino acid is amenable to constitute a link or bridge between two regions of a protein.

25. The method of claim 24, wherein the LEADs or super-LEADs possess increased thermostability compared to unmodified target protein.

26. The method of claim 1, wherein each is-HIT target amino acid affects binding affinity to its cognate receptor.

27. The method of claim 26, wherein the LEADs or super-LEADs possess either increased or decreased binding affinity to the LEADs or super-LEADs cognate receptor compared to unmodified target protein.

28. A method for generating proteins with a desired property, comprising:
(a) identifying a target protein;
(b) identifying is-HIT target residues associated with the property;
(c) preparing a collection of variant nucleic acid molecules encoding a collection of variant proteins, wherein each variant nucleic acid encodes a candidate LEAD mutant protein that differs by one replacement amino acid from the target protein at one is-HIT target residue;
(d) separately introducing the nucleic acids encoding each candidate LEAD protein into hosts for expression thereof and expressing the nucleic acid molecules encoding each variant protein;
(e) screening each variant LEAD candidate protein to identify any that have an activity that differs by a predetermined amount from the activity of the unmodified target protein, thereby identifying proteins that are LEADs.

29. The method of claim 28, wherein either: each of the identified is-HIT target residues in the target protein is replaced with codons encoding a restricted subset of the remaining 19 amino acids; or the total number of is-HIT residues that are replaced with replacement amino acids is less than the total amount of amino acid residues within the full-length of the target protein.

30. The method of claim 28, wherein each of the identified is-HIT residues in the target protein is replaced with codons encoding a restricted subset of the remaining 19 amino acids.

31. The method of claim 28, wherein the total number of is-HIT residues that are replaced with replacement amino acids is less than the total amount of amino acid residues within the full-length of the target protein.

32. The method of claim 28, wherein each of the identified is-HIT residues in the target protein is replaced with codons encoding a restricted subset of the remaining 19 amino acids; and the total number of is-HIT residues that are replaced with replacement amino acids is less than the total amount of amino acid residues within the full-length of the target protein.

33. The method of claim 28, further comprising:
(f) generating a population of sets of nucleic acid molecules encoding a set of candidate super-LEAD proteins, wherein each candidate super-LEAD protein comprises a combination of two or more of the single amino acid mutations derived from two or more LEAD mutant proteins;
(g) introducing each set of nucleic acid molecules encoding candidate super-LEADs into cells and expressing the encoded candidate super-LEAD proteins; and
(h) individually screening the sets of encoded candidate super-LEAD proteins to identify one or more proteins that has activity that differs from the unmodified target protein and has properties that differ from the original LEADs, wherein each such protein is designated a super-LEAD.

34. The method of claim 33, wherein the nucleic acid molecules in step (h) are produced by a method selected from among additive directional mutagenesis (ADM), multi-overlapped primer extensions, oligonucleotide-mediated mutagenesis, nucleic acid shuffling, recombination, site-specific mutagenesis, and de novo synthesis.

35. The method of claim 33, wherein the number of LEAD amino acid positions generated on a single nucleic acid molecule is selected from the group consisting of: two, three, four, five, six, seven, eight, nine, ten or more LEAD amino acid positions up to all of the LEAD amino acid positions.

36. The method of claim 28, wherein each is-HIT target residue is susceptible to digestion by one or more proteases.

37. The method of claim 36, wherein the LEADs or super-LEADs possess increased resistance to proteolysis compared to unmodified target protein.

38. The method of claim 28, wherein each is-HIT target residue is resistant to digestion by one or more proteases.

39. The method of claim 38, wherein the LEADs or super-LEADs possess increased digestibility compared to unmodified target protein.

40. The method of claim 28, wherein each is-HIT target residue affects protein conformation.

41. The method of claim 40, wherein the LEADs or super-LEADs possess either increased or decreased antigenicity compared to unmodified target protein.

42. The method of claim 28, wherein each is-HIT target amino acid affects protein amphipathic properties.

43. The method of claim 42, wherein the LEADs or super-LEADs possess either increased or decreased amphipathic properties compared to unmodified target protein.

44. The method of claim 28, wherein each is-HIT target amino acid is amenable to constitute a link or bridge between two regions of a protein.

45. The method of claim 44, wherein the LEADs or super-LEADs possess increased thermostability compared to unmodified target protein.

46. The method of claim 28, wherein each is-HIT target amino acid affects binding affinity to its cognate receptor.

47. The method of claim 46, wherein the LEADs or super-LEADs possess either increased or decreased binding affinity to the LEADs or super-LEADs cognate receptor compared to unmodified target protein.

48. The method of claim 28, wherein the change in activity is at least about 10%, 20%, 30%, 40%, 50%, 60%, 70%, 80%, 90% or 100%, of the activity of the unmodified target protein.

49. The method of claim 28, wherein the change in activity is not more than about 10%, 20%, 30%, 40%, 50%, 60%, 70%, 80%, 90% or 100%, of the activity of the unmodified target protein.

50. The method of claim 28, wherein the change in activity is at least about 2 times, 3 times, 4 times, 5 times, 6 times, 7 times, 8 times, 9 times, 10 times, 20 times, 30 times, 40 times, 50 times, 60 times, 70 times, 80 times, 90 times, 100 times, 200 times, 300 times, 400 times, 500 times, 600 times, 700 times, 800 times, 900 times, 1000 times, or more greater than the activity of the unmodified target protein.

51. A method for the production of a protein having an evolved property or activity compared to a unmodified target protein, the method comprising:
(a) selecting, on the target protein, one or more target amino acids amenable to providing the evolved property or activity upon amino acid replacement;
(b) replacing each target amino acid with a replacement amino acid amenable to providing the evolved property or activity to form a candidate LEAD protein, wherein only one amino acid replacement occurs on each target protein;
(c) expressing from a nucleic acid molecule each candidate LEAD protein in a cell contained in an addressable array; and
(d) assaying each candidate LEAD protein for the presence or absence of the evolved property or activity compared to a unmodified target protein, thereby identifying proteins that are LEADs.

52. The method of claim 51, wherein the selection of the one or more target amino acids in step a) is conducted in silico and the targets amino acids are designated is-Hits.

53. The method of claim 52, wherein the in silico selection step further comprises selecting an is-HIT target residue that is susceptible to digestion by one or more proteases.

54. The method of claim 53, wherein the LEADs possess increased resistance to proteolysis compared to unmodified target protein.

55. The method of claim 52, wherein the in silico selection step further comprises selecting an is-HIT target residue that is resistant to digestion by one or more proteases.

56. The method of claim 55, wherein the LEADs possess increased digestibility compared to unmodified target protein.

57. The method of claim 52, wherein the in silico selection step further comprises selecting an is-HIT target residue that affects protein conformation and/or immunogenicity.

58. The method of claim 57, wherein the LEADs possess either increased or decreased antigenicity compared to unmodified target protein.

59. The method of claim 52, wherein the in silico selection step further comprises selecting an is-HIT target amino acid affects protein amphipathic properties.

60. The method of claim 59, wherein the LEADs possess either increased or decreased amphipathic properties compared to unmodified target protein.

61. The method of claim 60, wherein the in silico selection step further comprises selecting an is-HIT target amino acid that is amenable to constitute a link or bridge between two regions of a protein.

62. The method of claim 61, wherein the LEADs possess increased thermostability compared to unmodified target protein.

63. The method of claim 62, wherein the in silico selection step further comprises selecting an is-HIT target amino acid that affects binding affinity to its cognate receptor.

64. The method of claim 63, wherein the LEADs possess either increased or decreased binding affinity to its cognate receptor compared to unmodified target protein.

65. The method of claim 51, wherein the change in activity is at least about 10%, 20%, 30%, 40%, 50%, 60%, 70%, 80%, 90% or 100%, of the activity of the unmodified target protein.

66. The method of claim 51, wherein the change in activity is not more than about 10%, 20%, 30%, 40%, 50%, 60%, 70%, 80%, 90% or 100%, of the activity of the unmodified target protein.

67. The method of claim 51, wherein the change in activity is at least about 2 times, 3 times, 4 times, 5 times, 6 times, 7 times, 8 times, 9 times, 10 times, 20 times, 30 times, 40 times, 50 times, 60 times, 70 times, 80 times, 90 times, 100 times, 200 times, 300 times, 400 times, 500 times, 600 times, 700 times, 800 times, 900 times, 1000 times, or more greater than the activity of the unmodified target protein.

68. A method of displaying the amino acid sequence of a protein, said method comprising:
providing a first axis that corresponds to amino acid positions along the length of the protein sequence, wherein each amino acid position is designated as a position-cell;
providing a second axis at each amino acid position within said protein, wherein said second axis contains 20 type-cells thereon, wherein each type-cell corresponds to a mutually exclusive amino acid; and
indicating the particular amino acid residue at the respective cell-type/position-cell intersection by a detectable signal.

69. The method of claim 68, wherein the number of position-cells is variable depending on the size of the protein.

70. The method of claim 68, wherein the number of position-cells equals the number of amino acids in the protein sequence.

71. The method of claim 68, wherein the first axis is vertical and the second axis is horizontal.

72. A medium, comprising a matrix display produced by the method of claim 68.

73. The medium of claim 72 that is can be read visually or that is computer readable.

74. A two-dimensional (2-D) matrix representation of a protein sequence comprising:
a first axis that corresponds to amino acid positions along the length of the protein sequence, wherein each amino acid position is designated as a position-cell;
a second axis at each amino acid position within said protein, wherein said second axis contains 20 type-cells thereon, wherein each type-cell corresponds to a mutually exclusive amino acid; and
an identifier indicating the particular amino acid residue at the respective cell-type/position-cell intersection.

75. A method for making a modified protein having substantially the same activity as unmodified protein, the method comprising:
replacing each amino acid position over the entire length of a target protein with the same reference amino acid, wherein only one reference amino acid is substituted on each molecule, to form a candidate HIT;
assaying each candidate HIT for a change in a selected protein activity;
identifying each locus on the target protein that is amenable to amino acid replacement without change in the protein activity as a pseudo-wild type position.

76. The method of claim 75, further comprising replacing one or more pseudo-wild type positions with candidate pseudo-wild type amino acids, wherein an amino acid replacement that does not result in a decrease in the requisite protein activity is designated a pseudo-wild type amino acid at that pseudo-wild type position.

77. The method of claim 76, wherein the change in a protein activity is a decrease.

78. The method of claim 76, wherein at least 1%, at least 2%, at least 3%, at least 4%, at least 5%, at least 6%, at least 7%, at least 8%, at least 9%, at least 10%, at least 15%, at least 20%, at least 25%, of amino acid residue positions on a target protein are replaced.

79. The method of claim 1, wherein the replacement amino acids are selected using Percent Accepted Mutations (PAM) matrices.

80. The method of claim 1, wherein the replacement amino acids are pseudo-wild type amino acids.

The application's sequence listing, which the Patent Office published only in electronic form, follows.

SEQUENCE LISTING (501 sequences)

SEQ ID NO: 1 - protein, 165 aa, Homo sapiens [sequence omitted]

SEQ ID NO: 2 - protein, 165 aa, Artificial Sequence
  D2A Mutant INF-alpha 2b
CALPQTHSLGSRRTLMLLAQMRRISLFSCLKDRHDFGFPQEEFGNQFQKAETIPVLHEMIQQIFNLFSTKDSSAAWDETLLDKFYTELYQQLNDLEACVIQGVGVTETPLMKEDSILAVRKYFQRITLYLKEKKYSPCAWEVVRAEIMRSFSLSTNLQESLRSKE

SEQ ID NO: 3 - protein, 165 aa, Artificial Sequence
  P4A Mutant INF-alpha 2b
CDLAQTHSLGSRRTLMLLAQMRRISLFSCLKDRHDFGFPQEEFGNQFQKAETIPVLHEMIQQIFNLFSTKDSSAAWDETLLDKFYTELYQQLNDLEACVIQGVGVTETPLMKEDSILAVRKYFQRITLYLKEKKYSPCAWEVVRAEIMRSFSLSTNLQESLRSKE

SEQ ID NO: 4 - protein, 165 aa, Artificial Sequence
  Q5A Mutant INF-alpha 2b
CDLPATHSLGSRRTLMLLAQMRRISLFSCLKDRHDFGFPQEEFGNQFQKAETIPVLHEMIQQIFNLFSTKDSSAAWDETLLDKFYTELYQQLNDLEACVIQGVGVTETPLMKEDSILAVRKYFQRITLYLKEKKYSPCAWEVVRAEIMRSFSLSTNLQESLRSKE

SEQ ID NO: 5 - protein, 165 aa, Artificial Sequence
  T6A Mutant INF-alpha 2b
CDLPQAHSLGSRRTLMLLAQMRRISLFSCLKDRHDFGFPQEEFGNQFQKAETIPVLHEMIQQIFNLFSTKDSSAAWDETLLDKFYTELYQQLNDLEACVIQGVGVTETPLMKEDSILAVRKYFQRITLYLKEKKYSPCAWEVVRAEIMRSFSLSTNLQESLRSKE

SEQ ID NO: 6 - protein, 165 aa, Artificial Sequence
  H7A Mutant INF-alpha 2b
CDLPQTASLGSRRTLMLLAQMRRISLFSCLKDRHDFGFPQEEFGNQFQKAETIPVLHEMIQQIFNLFSTKDSSAAWDETLLDKFYTELYQQLNDLEACVIQGVGVTETPLMKEDSILAVRKYFQRITLYLKEKKYSPCAWEVVRAEIMRSFSLSTNLQESLRSKE

SEQ ID NO: 7 - protein, 165 aa, Artificial Sequence
  S8A Mutant INF-alpha 2b
CDLPQTHALGSRRTLMLLAQMRRISLFSCLKDRHDFGFPQEEFGNQFQKAETIPVLHEMIQQIFNLFSTKDSSAAWDETLLDKFYTELYQQLNDLEACVIQGVGVTETPLMKEDSILAVRKYFQRITLYLKEKKYSPCAWEVVRAEIMRSFSLSTNLQESLRSKE

SEQ ID NO: 8 - protein, 165 aa, Artificial Sequence
  L9A Mutant INF-alpha 2b
CDLPQTHSAGSRRTLMLLAQMRRISLFSCLKDRHDFGFPQEEFGNQFQKAETIPVLHEMIQQIFNLFSTKDSSAAWDETLLDKFYTELYQQLNDLEACVIQGVGVTETPLMKEDSILAVRKYFQRITLYLKEKKYSPCAWEVVRAEIMRSFSLSTNLQESLRSKE

SEQ ID NO: 9 - protein, 165 aa, Artificial Sequence
  G10A Mutant INF-alpha 2b
CDLPQTHSLASRRTLMLLAQMRRISLFSCLKDRHDFGFPQEEFGNQFQKAETIPVLHEMIQQIFNLFSTKDSSAAWDETLLDKFYTELYQQLNDLEACVIQGVGVTETPLMKEDSILAVRKYFQRITLYLKEKKYSPCAWEVVRAEIMRSFSLSTNLQESLRSKE

SEQ ID NO: 10 - protein, 165 aa, Artificial Sequence
  S11A Mutant INF-alpha 2b
CDLPQTHSLGARRTLMLLAQMRRISLFSCLKDRHDFGFPQEEFGNQFQKAETIPVLHEMIQQIFNLFSTKDSSAAWDETLLDKFYTELYQQLNDLEACVIQGVGVTETPLMKEDSILAVRKYFQRITLYLKEKKYSPCAWEVVRAEIMRSFSLSTNLQESLRSKE

SEQ ID NO: 11 - protein, 165 aa, Artificial Sequence
  R12A Mutant INF-alpha 2b
CDLPQTHSLGSARTLMLLAQMRRISLFSCLKDRHDFGFPQEEFGNQFQKAETIPVLHEMIQQIFNLFSTKDSSAAWDETLLDKFYTELYQQLNDLEACVIQGVGVTETPLMKEDSILAVRKYFQRITLYLKEKKYSPCAWEVVRAEIMRSFSLSTNLQESLRSKE

SEQ ID NO: 12 - protein, 165 aa, Artificial Sequence
  R13A Mutant INF-alpha 2b
CDLPQTHSLGSRATLMLLAQMRRISLFSCLKDRHDFGFPQEEFGNQFQKAETIPVLHEMIQQIFNLFSTKDSSAAWDETLLDKFYTELYQQLNDLEACVIQGVGVTETPLMKEDSILAVRKYFQRITLYLKEKKYSPCAWEVVRAEIMRSFSLSTNLQESLRSKE

SEQ ID NO: 13 - protein, 165 aa, Artificial Sequence
  T14A Mutant INF-alpha 2b
CDLPQTHSLGSRRALMLLAQMRRISLFSCLKDRHDFGFPQEEFGNQFQKAETIPVLHEMIQQIFNLFSTKDSSAAWDETLLDKFYTELYQQLNDLEACVIQGVGVTETPLMKEDSILAVRKYFQRITLYLKEKKYSPCAWEVVRAEIMRSFSLSTNLQESLRSKE

SEQ ID NO: 14 - protein, 165 aa, Artificial Sequence
  L15A Mutant INF-alpha 2b
CDLPQTHSLGSRRTAMLLAQMRRISLFSCLKDRHDFGFPQEEFGNQFQKAETIPVLHEMIQQIFNLFSTKDSSAAWDETLLDKFYTELYQQLNDLEACVIQGVGVTETPLMKEDSILAVRKYFQRITLYLKEKKYSPCAWEVVRAEIMRSFSLSTNLQESLRSKE

SEQ ID NO: 15 - protein, 165 aa, Artificial Sequence
  M16A Mutant INF-alpha 2b
CDLPQTHSLGSRRTLALLAQMRRISLFSCLKDRHDFGFPQEEFGNQFQKAETIPVLHEMIQQIFNLFSTKDSSAAWDETLLDKFYTELYQQLNDLEACVIQGVGVTETPLMKEDSILAVRKYFQRITLYLKEKKYSPCAWEVVRAEIMRSFSLSTNLQESLRSKE

SEQ ID NO: 16 - protein, 165 aa, Artificial Sequence
  L17A Mutant INF-alpha 2b
CDLPQTHSLGSRRTLMALAQMRRISLFSCLKDRHDFGFPQEEFGNQFQKAETIPVLHEMIQQIFNLFSTKDSSAAWDETLLDKFYTELYQQLNDLEACVIQGVGVTETPLMKEDSILAVRKYFQRITLYLKEKKYSPCAWEVVRAEIMRSFSLSTNLQESLRSKE

SEQ ID NO: 17 - protein, 165 aa, Artificial Sequence
  Q20A Mutant INF-alpha 2b
CDLPQTHSLGSRRTLMLLAAMRRISLFSCLKDRHDFGFPQEEFGNQFQKAETIPVLHEMIQQIFNLFSTKDSSAAWDETLLDKFYTELYQQLNDLEACVIQGVGVTETPLMKEDSILAVRKYFQRITLYLKEKKYSPCAWEVVRAEIMRSFSLSTNLQESLRSKE

SEQ ID NO: 18 - protein, 165 aa, Artificial Sequence
  R23A Mutant INF-alpha 2b
CDLPQTHSLGSRRTLMLLAQMRAISLFSCLKDRHDFGFPQEEFGNQFQKAETIPVLHEMIQQIFNLFSTKDSSAAWDETLLDKFYTELYQQLNDLEACVIQGVGVTETPLMKEDSILAVRKYFQRITLYLKEKKYSPCAWEVVRAEIMRSFSLSTNLQESLRSKE

SEQ ID NO: 19 - protein, 165 aa, Artificial Sequence
  I24A Mutant INF-alpha 2b
CDLPQTHSLGSRRTLMLLAQMRRASLFSCLKDRHDFGFPQEEFGNQFQKAETIPVLHEMIQQIFNLFSTKDSSAAWDETLLDKFYTELYQQLNDLEACVIQGVGVTETPLMKEDSILAVRKYFQRITLYLKEKKYSPCAWEVVRAEIMRSFSLSTNLQESLRSKE

SEQ ID NO: 20 - protein, 165 aa, Artificial Sequence
  S25A Mutant INF-alpha 2b
CDLPQTHSLGSRRTLMLLAQMRRIALFSCLKDRHDFGFPQEEFGNQFQKAETIPVLHEMIQQIFNLFSTKDSSAAWDETLLDKFYTELYQQLNDLEACVIQGVGVTETPLMKEDSILAVRKYFQRITLYLKEKKYSPCAWEVVRAEIMRSFSLSTNLQESLRSKE

SEQ ID NO: 21 - protein, 165 aa, Artificial Sequence
  L26A Mutant INF-alpha 2b
CDLPQTHSLGSRRTLMLLAQMRRISAFSCLKDRHDFGFPQEEFGNQFQKAETIPVLHEMIQQIFNLFSTKDSSAAWDETLLDKFYTELYQQLNDLEACVIQGVGVTETPLMKEDSILAVRKYFQRITLYLKEKKYSPCAWEVVRAEIMRSFSLSTNLQESLRSKE

SEQ ID NO: 22 - protein, 165 aa, Artificial Sequence
  S28A Mutant INF-alpha 2b
CDLPQTHSLGSRRTLMLLAQMRRISLFACLKDRHDFGFPQEEFGNQFQKAETIPVLHEMIQQIFNLFSTKDSSAAWDETLLDKFYTELYQQLNDLEACVIQGVGVTETPLMKEDSILAVRKYFQRITLYLKEKKYSPCAWEVVRAEIMRSFSLSTNLQESLRSKE

SEQ ID NO: 23 - protein, 165 aa, Artificial Sequence
  C29A Mutant INF-alpha 2b
CDLPQTHSLGSRRTLMLLAQMRRISLFSALKDRHDFGFPQEEFGNQFQKAETIPVLHEMIQQIFNLFSTKDSSAAWDETLLDKFYTELYQQLNDLEACVIQGVGVTETPLMKEDSILAVRKYFQRITLYLKEKKYSPCAWEVVRAEIMRSFSLSTNLQESLRSKE

SEQ ID NO: 24 - protein, 165 aa, Artificial Sequence
  L30A Mutant INF-alpha 2b
CDLPQTHSLGSRRTLMLLAQMRRISLFSCAKDRHDFGFPQEEFGNQFQKAETIPVLHEMIQQIFNLFSTKDSSAAWDETLLDKFYTELYQQLNDLEACVIQGVGVTETPLMKEDSILAVRKYFQRITLYLKEKKYSPCAWEVVRAEIMRSFSLSTNLQESLRSKE

SEQ ID NO: 25 - protein, 165 aa, Artificial Sequence
  K31A Mutant INF-alpha 2b
CDLPQTHSLGSRRTLMLLAQMRRISLFSCLADRHDFGFPQEEFGNQFQKAETIPVLHEMIQQIFNLFSTKDSSAAWDETLLDKFYTELYQQLNDLEACVIQGVGVTETPLMKEDSILAVRKYFQRITLYLKEKKYSPCAWEVVRAEIMRSFSLSTNLQESLRSKE

SEQ ID NO: 26 - protein, 165 aa, Artificial Sequence
  D32A Mutant INF-alpha 2b
CDLPQTHSLGSRRTLMLLAQMRRISLFSCLKARHDFGFPQEEFGNQFQKAETIPVLHEMIQQIFNLFSTKDSSAAWDETLLDKFYTELYQQLNDLEACVIQGVGVTETPLMKEDSILAVRKYFQRITLYLKEKKYSPCAWEVVRAEIMRSFSLSTNLQESLRSKE

SEQ ID NO: 27 - protein, 165 aa, Artificial Sequence
  R33A Mutant INF-alpha 2b
CDLPQTHSLGSRRTLMLLAQMRRISLFSCLKDAHDFGFPQEEFGNQFQKAETIPVLHEMIQQIFNLFSTKDSSAAWDETLLDKFYTELYQQLNDLEACVIQGVGVTETPLMKEDSILAVRKYFQRITLYLKEKKYSPCAWEVVRAEIMRSFSLSTNLQESLRSKE

SEQ ID NO: 28 - protein, 165 aa, Artificial Sequence
  D35A Mutant INF-alpha 2b
CDLPQTHSLGSRRTLMLLAQMRRISLFSCLKDRHAFGFPQEEFGNQFQKAETIPVLHEMIQQIFNLFSTKDSSAAWDETLLDKFYTELYQQLNDLEACVIQGVGVTETPLMKEDSILAVRKYFQRITLYLKEKKYSPCAWEVVRAEIMRSFSLSTNLQESLRSKE

SEQ ID NO: 29 - protein, 165 aa, Artificial Sequence
  G37A Mutant INF-alpha 2b
CDLPQTHSLGSRRTLMLLAQMRRISLFSCLKDRHDFAFPQEEFGNQFQKAETIPVLHEMIQQIFNLFSTKDSSAAWDETLLDKFYTELYQQLNDLEACVIQGVGVTETPLMKEDSILAVRKYFQRITLYLKEKKYSPCAWEVVRAEIMRSFSLSTNLQESLRSKE

SEQ ID NO: 30 - protein, 165 aa, Artificial Sequence
  P39A Mutant INF-alpha 2b
CDLPQTHSLGSRRTLMLLAQMRRISLFSCLKDRHDFGFAQEEFGNQFQKAETIPVLHEMIQQIFNLFSTKDSSAAWDETLLDKFYTELYQQLNDLEACVIQGVGVTETPLMKEDSILAVRKYFQRITLYLKEKKYSPCAWEVVRAEIMRSFSLSTNLQESLRSKE

SEQ ID NO: 31 - protein, 165 aa, Artificial Sequence
  E41A Mutant INF-alpha 2b
CDLPQTHSLGSRRTLMLLAQMRRISLFSCLKDRHDFGFPQAEFGNQFQKAETIPVLHEMIQQIFNLFSTKDSSAAWDETLLDKFYTELYQQLNDLEACVIQGVGVTETPLMKEDSILAVRKYFQRITLYLKEKKYSPCAWEVVRAEIMRSFSLSTNLQESLRSKE

SEQ ID NO: 32 - protein, 165 aa, Artificial Sequence
  E42A Mutant INF-alpha 2b
CDLPQTHSLGSRRTLMLLAQMRRISLFSCLKDRHDFGFPQEAFGNQFQKAETIPVLHEMIQQIFNLFSTKDSSAAWDETLLDKFYTELYQQLNDLEACVIQGVGVTETPLMKEDSILAVRKYFQRITLYLKEKKYSPCAWEVVRAEIMRSFSLSTNLQESLRSKE

SEQ ID NO: 33 - protein, 165 aa, Artificial Sequence
  F43A Mutant INF-alpha 2b
CDLPQTHSLGSRRTLMLLAQMRRISLFSCLKDRHDFGFPQEEAGNQFQKAETIPVLHEMIQQIFNLFSTKDSSAAWDETLLDKFYTELYQQLNDLEACVIQGVGVTETPLMKEDSILAVRKYFQRITLYLKEKKYSPCAWEVVRAEIMRSFSLSTNLQESLRSKE

SEQ ID NO: 34 - protein, 165 aa, Artificial Sequence
  N45A Mutant INF-alpha 2b
CDLPQTHSLGSRRTLMLLAQMRRISLFSCLKDRHDFGFPQEEFGAQFQKAETIPVLHEMIQQIFNLFSTKDSSAAWDETLLDKFYTELYQQLNDLEACVIQGVGVTETPLMKEDSILAVRKYFQRITLYLKEKKYSPCAWEVVRAEIMRSFSLSTNLQESLRSKE

SEQ ID NO: 35 - protein, 165 aa, Artificial Sequence
  F47A Mutant INF-alpha 2b
CDLPQTHSLGSRRTLMLLAQMRRISLFSCLKDRHDFGFPQEEFGNQAQKAETIPVLHEMIQQIFNLFSTKDSSAAWDETLLDKFYTELYQQLNDLEACVIQGVGVTETPLMKEDSILAVRKYFQRITLYLKEKKYSPCAWEVVRAEIMRSFSLSTNLQESLRSKE

SEQ ID NO: 36 - protein, 165 aa, Artificial Sequence
  E51A Mutant INF-alpha 2b
CDLPQTHSLGSRRTLMLLAQMRRISLFSCLKDRHDFGFPQEEFGNQFQKAATIPVLHEMIQQIFNLFSTKDSSAAWDETLLDKFYTELYQQLNDLEACVIQGVGVTETPLMKEDSILAVRKYFQRITLYLKEKKYSPCAWEVVRAEIMRSFSLSTNLQESLRSKE

SEQ ID NO: 37 - protein, 165 aa, Artificial Sequence
  T52A Mutant INF-alpha 2b
CDLPQTHSLGSRRTLMLLAQMRRISLFSCLKDRHDFGFPQEEFGNQFQKAEAIPVLHEMIQQIFNLFSTKDSSAAWDETLLDKFYTELYQQLNDLEACVIQGVGVTETPLMKEDSILAVRKYFQRITLYLKEKKYSPCAWEVVRAEIMRSFSLSTNLQESLRSKE

SEQ ID NO: 38 - protein, 165 aa, Artificial Sequence
  I53A Mutant INF-alpha 2b
CDLPQTHSLGSRRTLMLLAQMRRISLFSCLKDRHDFGFPQEEFGNQFQKAETAPVLHEMIQQIFNLFSTKDSSAAWDETLLDKFYTELYQQLNDLEACVIQGVGVTETPLMKEDSILAVRKYFQRITLYLKEKKYSPCAWEVVRAEIMRSFSLSTNLQESLRSKE

SEQ ID NO: 39 - protein, 165 aa, Artificial Sequence
  P54A Mutant INF-alpha 2b
CDLPQTHSLGSRRTLMLLAQMRRISLFSCLKDRHDFGFPQEEFGNQFQKAETIAVLHEMIQQIFNLFSTKDSSAAWDETLLDKFYTELYQQLNDLEACVIQGVGVTETPLMKEDSILAVRKYFQRITLYLKEKKYSPCAWEVVRAEIMRSFSLSTNLQESLRSKE

SEQ ID NO: 40 - protein, 165 aa, Artificial Sequence
  V55A Mutant INF-alpha 2b
CDLPQTHSLGSRRTLMLLAQMRRISLFSCLKDRHDFGFPQEEFGNQFQKAETIPALHEMIQQIFNLFSTKDSSAAWDETLLDKFYTELYQQLNDLEACVIQGVGVTETPLMKEDSILAVRKYFQRITLYLKEKKYSPCAWEVVRAEIMRSFSLSTNLQESLRSKE

SEQ ID NO: 41 - protein, 165 aa, Artificial Sequence
  L56A Mutant INF-alpha 2b
CDLPQTHSLGSRRTLMLLAQMRRISLFSCLKDRHDFGFPQEEFGNQFQKAETIPVAHEMIQQIFNLFSTKDSSAAWDETLLDKFYTELYQQLNDLEACVIQGVGVTETPLMKEDSILAVRKYFQRITLYLKEKKYSPCAWEVVRAEIMRSFSLSTNLQESLRSKE

SEQ ID NO: 42 - protein, 165 aa, Artificial Sequence
  H57A Mutant INF-alpha 2b
CDLPQTHSLGSRRTLMLLAQMRRISLFSCLKDRHDFGFPQEEFGNQFQKAETIPVLAEMIQQIFNLFSTKDSSAAWDETLLDKFYTELYQQLNDLEACVIQGVGVTETPLMKEDSILAVRKYFQRITLYLKEKKYSPCAWEVVRAEIMRSFSLSTNLQESLRSKE

SEQ ID NO: 43 - protein, 165 aa, Artificial Sequence
  E58A Mutant INF-alpha 2b
CDLPQTHSLGSRRTLMLLAQMRRISLFSCLKDRHDFGFPQEEFGNQFQKAETIPVLHAMIQQIFNLFSTKDSSAAWDETLLDKFYTELYQQLNDLEACVIQGVGVTETPLMKEDSILAVRKYFQRITLYLKEKKYSPCAWEVVRAEIMRSFSLSTNLQESLRSKE

SEQ ID NO: 44 - protein, 165 aa, Artificial Sequence
  M59A Mutant INF-alpha 2b
CDLPQTHSLGSRRTLMLLAQMRRISLFSCLKDRHDFGFPQEEFGNQFQKAETIPVLHEAIQQIFNLFSTKDSSAAWDETLLDKFYTELYQQLNDLEACVIQGVGVTETPLMKEDSILAVRKYFQRITLYLKEKKYSPCAWEVVRAEIMRSFSLSTNLQESLRSKE

SEQ ID NO: 45 - protein, 165 aa, Artificial Sequence
  I60A Mutant INF-alpha 2b
CDLPQTHSLGSRRTLMLLAQMRRISLFSCLKDRHDFGFPQEEFGNQFQKAETIPVLHEMAQQIFNLFSTKDSSAAWDETLLDKFYTELYQQLNDLEACVIQGVGVTETPLMKEDSILAVRKYFQRITLYLKEKKYSPCAWEVVRAEIMRSFSLSTNLQESLRSKE

SEQ ID NO: 46 - protein, 165 aa, Artificial Sequence
  I63A Mutant INF-alpha 2b
CDLPQTHSLGSRRTLMLLAQMRRISLFSCLKDRHDFGFPQEEFGNQFQKAETIPVLHEMIQQAFNLFSTKDSSAAWDETLLDKFYTELYQQLNDLEACVIQGVGVTETPLMKEDSILAVRKYFQRITLYLKEKKYSPCAWEVVRAEIMRSFSLSTNLQESLRSKE

SEQ ID NO: 47 - protein, 165 aa, Artificial Sequence
  F64A Mutant INF-alpha 2b
CDLPQTHSLGSRRTLMLLAQMRRISLFSCLKDRHDFGFPQEEFGNQFQKAETIPVLHEMIQQIANLFSTKDSSAAWDETLLDKFYTELYQQLNDLEACVIQGVGVTETPLMKEDSILAVRKYFQRITLYLKEKKYSPCAWEVVRAEIMRSFSLSTNLQESLRSKE

SEQ ID NO: 48 - protein, 165 aa, Artificial Sequence
  N65A Mutant INF-alpha 2b
CDLPQTHSLGSRRTLMLLAQMRRISLFSCLKDRHDFGFPQEEFGNQFQKAETIPVLHEMIQQIFALFSTKDSSAAWDETLLDKFYTELYQQLNDLEACVIQGVGVTETPLMKEDSILAVRKYFQRITLYLKEKKYSPCAWEVVRAEIMRSFSLSTNLQESLRSKE

SEQ ID NO: 49 - protein, 165 aa, Artificial Sequence
  L66A Mutant INF-alpha 2b
CDLPQTHSLGSRRTLMLLAQMRRISLFSCLKDRHDFGFPQEEFGNQFQKAETIPVLHEMIQQIFNAFSTKDSSAAWDETLLDKFYTELYQQLNDLEACVIQGVGVTETPLMKEDSILAVRKYFQRITLYLKEKKYSPCAWEVVRAEIMRSFSLSTNLQESLRSKE

SEQ ID NO: 50 - protein, 165 aa, Artificial Sequence
  F67A Mutant INF-alpha 2b
CDLPQTHSLGSRRTLMLLAQMRRISLFSCLKDRHDFGFPQEEFGNQFQKAETIPVLHEMIQQIFNLASTKDSSAAWDETLLDKFYTELYQQLNDLEACVIQGVGVTETPLMKEDSILAVRKYFQRITLYLKEKKYSPCAWEVVRAEIMRSFSLSTNLQESLRSKE

SEQ ID NO: 51 - protein, 165 aa, Artificial Sequence
  T69A Mutant INF-alpha 2b
CDLPQTHSLGSRRTLMLLAQMRRISLFSCLKDRHDFGFPQEEFGNQFQKAETIPVLHEMIQQIFNLFSAKDSSAAWDETLLDKFYTELYQQLNDLEACVIQGVGVTETPLMKEDSILAVRKYFQRITLYLKEKKYSPCAWEVVRAEIMRSFSLSTNLQESLRSKE

SEQ ID NO: 52 - protein, 165 aa, Artificial Sequence
  K70A Mutant INF-alpha 2b
CDLPQTHSLGSRRTLMLLAQMRRISLFSCLKDRHDFGFPQEEFGNQFQKAETIPVLHEMIQQIFNLFSTADSSAAWDETLLDKFYTELYQQLNDLEACVIQGVGVTETPLMKEDSILAVRKYFQRITLYLKEKKYSPCAWEVVRAEIMRSFSLSTNLQESLRSKE

SEQ ID NO: 53 - protein, 165 aa, Artificial Sequence
  D71A Mutant INF-alpha 2b
CDLPQTHSLGSRRTLMLLAQMRRISLFSCLKDRHDFGFPQEEFGNQFQKAETIPVLHEMIQQIFNLFSTKASSAAWDETLLDKFYTELYQQLNDLEACVIQGVGVTETPLMKEDSILAVRKYFQRITLYLKEKKYSPCAWEVVRAEIMRSFSLSTNLQESLRSKE

SEQ ID NO: 54 - protein, 165 aa, Artificial Sequence
  S72A Mutant INF-alpha 2b
CDLPQTHSLGSRRTLMLLAQMRRISLFSCLKDRHDFGFPQEEFGNQFQKAETIPVLHEMIQQIFNLFSTKDASAAWDETLLDKFYTELYQQLNDLEACVIQGVGVTETPLMKEDSILAVRKYFQRITLYLKEKKYSPCAWEVVRAEIMRSFSLSTNLQESLRSKE

SEQ ID NO: 55 - protein, 165 aa, Artificial Sequence
  W76A Mutant INF-alpha 2b
CDLPQTHSLGSRRTLMLLAQMRRISLFSCLKDRHDFGFPQEEFGNQFQKAETIPVLHEMIQQIFNLFSTKDSSAAADETLLDKFYTELYQQLNDLEACVIQGVGVTETPLMKEDSILAVRKYFQRITLYLKEKKYSPCAWEVVRAEIMRSFSLSTNLQESLRSKE

SEQ ID NO: 56 - protein, 165 aa, Artificial Sequence
  D77A Mutant INF-alpha 2b
CDLPQTHSLGSRRTLMLLAQMRRISLFSCLKDRHDFGFPQEEFGNQFQKAETIPVLHEMIQQIFNLFSTKDSSAAWAETLLDKFYTELYQQLNDLEACVIQGVGVTETPLMKEDSILAVRKYFQRITLYLKEKKYSPCAWEVVRAEIMRSFSLSTNLQESLRSKE

SEQ ID NO: 57 - protein, 165 aa, Artificial Sequence
  E78A Mutant INF-alpha 2b
CDLPQTHSLGSRRTLMLLAQMRRISLFSCLKDRHDFGFPQEEFGNQFQKAETIPVLHEMIQQIFNLFSTKDSSAAWDATLLDKFYTELYQQLNDLEACVIQGVGVTETPLMKEDSILAVRKYFQRITLYLKEKKYSPCAWEVVRAEIMRSFSLSTNLQESLRSKE

SEQ ID NO: 58 - protein, 165 aa, Artificial Sequence
  L81A Mutant INF-alpha 2b
CDLPQTHSLGSRRTLMLLAQMRRISLFSCLKDRHDFGFPQEEFGNQFQKAETIPVLHEMIQQIFNLFSTKDSSAAWDETLADKFYTELYQQLNDLEACVIQGVGVTETPLMKEDSILAVRKYFQRITLYLKEKKYSPCAWEVVRAEIMRSFSLSTNLQESLRSKE

SEQ ID NO: 59 - protein, 165 aa, Artificial Sequence
  D82A Mutant INF-alpha 2b
CDLPQTHSLGSRRTLMLLAQMRRISLFSCLKDRHDFGFPQEEFGNQFQKAETIPVLHEMIQQIFNLFSTKDSSAAWDETLLAKFYTELYQQLNDLEACVIQGVGVTETPLMKEDSILAVRKYFQRITLYLKEKKYSPCAWEVVRAEIMRSFSLSTNLQESLRSKE

SEQ ID NO: 60 - protein, 165 aa, Artificial Sequence
  K83A Mutant INF-alpha 2b
CDLPQTHSLGSRRTLMLLAQMRRISLFSCLKDRHDFGFPQEEFGNQFQKAETIPVLHEMIQQIFNLFSTKDSSAAWDETLLDAFYTELYQQLNDLEACVIQGVGVTETPLMKEDSILAVRKYFQRITLYLKEKKYSPCAWEVVRAEIMRSFSLSTNLQESLRSKE

SEQ ID NO: 61 - protein, 165 aa, Artificial Sequence
  F84A Mutant INF-alpha 2b
CDLPQTHSLGSRRTLMLLAQMRRISLFSCLKDRHDFGFPQEEFGNQFQKAETIPVLHEMIQQIFNLFSTKDSSAAWDETLLDKAYTELYQQLNDLEACVIQGVGVTETPLMKEDSILAVRKYFQRITLYLKEKKYSPCAWEVVRAEIMRSFSLSTNLQESLRSKE

SEQ ID NO: 62 - protein, 165 aa, Artificial Sequence
  Y85A Mutant INF-alpha 2b
CDLPQTHSLGSRRTLMLLAQMRRISLFSCLKDRHDFGFPQEEFGNQFQKAETIPVLHEMIQQIFNLFSTKDSSAAWDETLLDKFATELYQQLNDLEACVIQGVGVTETPLMKEDSILAVRKYFQRITLYLKEKKYSPCAWEVVRAEIMRSFSLSTNLQESLRSKE

SEQ ID NO: 63 - protein, 165 aa, Artificial Sequence
  Y89A Mutant INF-alpha 2b
CDLPQTHSLGSRRTLMLLAQMRRISLFSCLKDRHDFGFPQEEFGNQFQKAETIPVLHEMIQQIFNLFSTKDSSAAWDETLLDKFYTELAQQLNDLEACVIQGVGVTETPLMKEDSILAVRKYFQRITLYLKEKKYSPCAWEVVRAEIMRSFSLSTNLQESLRSKE

SEQ ID NO: 64 - protein, 165 aa, Artificial Sequence
  Q90A Mutant INF-alpha 2b
CDLPQTHSLGSRRTLMLLAQMRRISLFSCLKDRHDFGFPQEEFGNQFQKAETIPVLHEMIQQIFNLFSTKDSSAAWDETLLDKFYTELYAQLNDLEACVIQGVGVTETPLMKEDSILAVRKYFQRITLYLKEKKYSPCAWEVVRAEIMRSFSLSTNLQESLRSKE

SEQ ID NO: 65 - protein, 165 aa, Artificial Sequence
  Q91A Mutant INF-alpha 2b
CDLPQTHSLGSRRTLMLLAQMRRISLFSCLKDRHDFGFPQEEFGNQFQKAETIPVLHEMIQQIFNLFSTKDSSAAWDETLLDKFYTELYQALNDLEACVIQGVGVTETPLMKEDSILAVRKYFQRITLYLKEKKYSPCAWEVVRAEIMRSFSLSTNLQESLRSKE

SEQ ID NO: 66 - protein, 165 aa, Artificial Sequence
  N93A Mutant INF-alpha 2b
CDLPQTHSLGSRRTLMLLAQMRRISLFSCLKDRHDFGFPQEEFGNQFQKAETIPVLHEMIQQIFNLFSTKDSSAAWDETLLDKFYTELYQQLADLEACVIQGVGVTETPLMKEDSILAVRKYFQRITLYLKEKKYSPCAWEVVRAEIMRSFSLSTNLQESLRSKE

SEQ ID NO: 67 - protein, 165 aa, Artificial Sequence
  D94A Mutant INF-alpha 2b
CDLPQTHSLGSRRTLMLLAQMRRISLFSCLKDRHDFGFPQEEFGNQFQKAETIPVLHEMIQQIFNLFSTKDSSAAWDETLLDKFYTELYQQLNALEACVIQGVGVTETPLMKEDSILAVRKYFQRITLYLKEKKYSPCAWEVVRAEIMRSFSLSTNLQESLRSKE

SEQ ID NO: 68 - protein, 165 aa, Artificial Sequence
  C98A Mutant INF-alpha 2b
CDLPQTHSLGSRRTLMLLAQMRRISLFSCLKDRHDFGFPQEEFGNQFQKAETIPVLHEMIQQIFNLFSTKDSSAAWDETLLDKFYTELYQQLNDLEAAVIQGVGVTETPLMKEDSILAVRKYFQRITLYLKEKKYSPCAWEVVRAEIMRSFSLSTNLQESLRSKE

SEQ ID NO: 69 - protein, 165 aa, Artificial Sequence
  V99A Mutant INF-alpha 2b
CDLPQTHSLGSRRTLMLLAQMRRISLFSCLKDRHDFGFPQEEFGNQFQKAETIPVLHEMIQQIFNLFSTKDSSAAWDETLLDKFYTELYQQLNDLEACAIQGVGVTETPLMKEDSILAVRKYFQRITLYLKEKKYSPCAWEVVRAEIMRSFSLSTNLQESLRSKE

SEQ ID NO: 70 - protein, 165 aa, Artificial Sequence
  G104A Mutant INF-alpha 2b
CDLPQTHSLGSRRTLMLLAQMRRISLFSCLKDRHDFGFPQEEFGNQFQKAETIPVLHEMIQQIFNLFSTKDSSAAWDETLLDKFYTELYQQLNDLEACVIQGVAVTETPLMKEDSILAVRKYFQRITLYLKEKKYSPCAWEVVRAEIMRSFSLSTNLQESLRSKE

SEQ ID NO: 71 - protein, 165 aa, Artificial Sequence
  L110A Mutant INF-alpha 2b
CDLPQTHSLGSRRTLMLLAQMRRISLFSCLKDRHDFGFPQEEFGNQFQKAETIPVLHEMIQQIFNLFSTKDSSAAWDETLLDKFYTELYQQLNDLEACVIQGVGVTETPAMKEDSILAVRKYFQRITLYLKEKKYSPCAWEVVRAEIMRSFSLSTNLQESLRSKE

SEQ ID NO: 72 - protein, 165 aa, Artificial Sequence
  S115A Mutant INF-alpha 2b
CDLPQTHSLGSRRTLMLLAQMRRISLFSCLKDRHDFGFPQEEFGNQFQKAETIPVLHEMIQQIFNLFSTKDSSAAWDETLLDKFYTELYQQLNDLEACVIQGVGVTETPLMKEDAILAVRKYFQRITLYLKEKKYSPCAWEVVRAEIMRSFSLSTNLQESLRSKE

SEQ ID NO: 73 - protein, 165 aa, Artificial Sequence
  Y122A Mutant INF-alpha 2b
CDLPQTHSLGSRRTLMLLAQMRRISLFSCLKDRHDFGFPQEEFGNQFQKAETIPVLHEMIQQIFNLFSTKDSSAAWDETLLDKFYTELYQQLNDLEACVIQGVGVTETPLMKEDSILAVRKAFQRITLYLKEKKYSPCAWEVVRAEIMRSFSLSTNLQESLRSKE

SEQ ID NO: 74 - protein, 165 aa, Artificial Sequence
  W140A Mutant INF-alpha 2b
CDLPQTHSLGSRRTLMLLAQMRRISLFSCLKDRHDFGFPQEEFGNQFQKAETIPVLHEMIQQIFNLFSTKDSSAAWDETLLDKFYTELYQQLNDLEACVIQGVGVTETPLMKEDSILAVRKYFQRITLYLKEKKYSPCAAEVVRAEIMRSFSLSTNLQESLRSKE

SEQ ID NO: 75 - protein, 165 aa, Artificial Sequence
  E146A Mutant INF-alpha 2b
CDLPQTHSLGSRRTLMLLAQMRRISLFSCLKDRHDFGFPQEEFGNQFQKAETIPVLHEMIQQIFNLFSTKDSSAAWDETLLDKFYTELYQQLNDLEACVIQGVGVTETPLMKEDSILAVRKYFQRITLYLKEKKYSPCAWEVVRAAIMRSFSLSTNLQESLRSKE

SEQ ID NO: 76 - protein, 165 aa, Artificial Sequence
  L3V Mutant INF-alpha 2b
CDVPQTHSLGSRRTLMLLAQMRRISLFSCLKDRHDFGFPQEEFGNQFQKAETIPVLHEMIQQIFNLFSTKDSSAAWDETLLDKFYTELYQQLNDLEACVIQGVGVTETPLMKEDSILAVRKYFQRITLYLKEKKYSPCAWEVVRAEIMRSFSLSTNLQESLRSKE

SEQ ID NO: 77 - protein, 165 aa, Artificial Sequence
  R12H Mutant INF-alpha 2b
CDLPQTHSLGSHRTLMLLAQMRRISLFSCLKDRHDFGFPQEEFGNQFQKAETIPVLHEMIQQIFNLFSTKDSSAAWDETLLDKFYTELYQQLNDLEACVIQGVGVTETPLMKEDSILAVRKYFQRITLYLKEKKYSPCAWEVVRAEIMRSFSLSTNLQESLRSKE

SEQ ID NO: 78 - protein, 165 aa, Artificial Sequence
  R13H Mutant INF-alpha 2b
CDLPQTHSLGSRHTLMLLAQMRRISLFSCLKDRHDFGFPQEEFGNQFQKAETIPVLHEMIQQIFNLFSTKDSSAAWDETLLDKFYTELYQQLNDLEACVIQGVGVTETPLMKEDSILAVRKYFQRITLYLKEKKYSPCAWEVVRAEIMRSFSLSTNLQESLRSKE

SEQ ID NO: 79 - protein, 165 aa, Artificial Sequence
  M16V Mutant INF-alpha 2b
CDLPQTHSLGSRRTLVLLAQMRRISLFSCLKDRHDFGFPQEEFGNQFQKAETIPVLHEMIQQIFNLFSTKDSSAAWDETLLDKFYTELYQQLNDLEACVIQGVGVTETPLMKEDSILAVRKYFQRITLYLKEKKYSPCAWEVVRAEIMRSFSLSTNLQESLRSKE

SEQ ID NO: 80 - protein, 165 aa, Artificial Sequence
  M16I Mutant INF-alpha 2b
CDLPQTHSLGSRRTLILLAQMRRISLFSCLKDRHDFGFPQEEFGNQFQKAETIPVLHEMIQQIFNLFSTKDSSAAWDETLLDKFYTELYQQLNDLEACVIQGVGVTETPLMKEDSILAVRKYFQRITLYLKEKKYSPCAWEVVRAEIMRSFSLSTNLQESLRSKE

SEQ ID NO: 81 - protein, 165 aa, Artificial Sequence
  R22H Mutant INF-alpha 2b
CDLPQTHSLGSRRTLMLLAQMHRISLFSCLKDRHDFGFPQEEFGNQFQKAETIPVLHEMIQQIFNLFSTKDSSAAWDETLLDKFYTELYQQLNDLEACVIQGVGVTETPLMKEDSILAVRKYFQRITLYLKEKKYSPCAWEVVRAEIMRSFSLSTNLQESLRSKE

SEQ ID NO: 82 - protein, 165 aa, Artificial Sequence
  F27I Mutant INF-alpha 2b
CDLPQTHSLGSRRTLMLLAQMRRISLISCLKDRHDFGFPQEEFGNQFQKAETIPVLHEMIQQIFNLFSTKDSSAAWDETLLDKFYTELYQQLNDLEACVIQGVGVTETPLMKEDSILAVRKYFQRITLYLKEKKYSPCAWEVVRAEIMRSFSLSTNLQESLRSKE

SEQ ID NO: 83 - protein, 165 aa, Artificial Sequence
  F27V Mutant INF-alpha 2b
CDLPQTHSLGSRRTLMLLAQMRRISLVSCLKDRHDFGFPQEEFGNQFQKAETIPVLHEMIQQIFNLFSTKDSSAAWDETLLDKFYTELYQQLNDLEACVIQGVGVTETPLMKEDSILAVRKYFQRITLYLKEKKYSPCAWEVVRAEIMRSFSLSTNLQESLRSKE

SEQ ID NO: 84 - protein, 165 aa, Artificial Sequence
  L30I Mutant INF-alpha 2b
CDLPQTHSLGSRRTLMLLAQMRRISLFSCIKDRHDFGFPQEEFGNQFQKAETIPVLHEMIQQIFNLFSTKDSSAAWDETLLDKFYTELYQQLNDLEACVIQGVGVTETPLMKEDSILAVRKYFQRITLYLKEKKYSPCAWEVVRAEIMRSFSLSTNLQESLRSKE

SEQ ID NO: 85 - protein, 165 aa, Artificial Sequence
  K31Q Mutant INF-alpha 2b
CDLPQTHSLGSRRTLMLLAQMRRISLFSCLQDRHDFGFPQEEFGNQFQKAETIPVLHEMIQQIFNLFSTKDSSAAWDETLLDKFYTELYQQLNDLEACVIQGVGVTETPLMKEDSILAVRKYFQRITLYLKEKKYSPCAWEVVRAEIMRSFSLSTNLQESLRSKE

SEQ ID NO: 86 - protein, 165 aa, Artificial Sequence
  R33H Mutant INF-alpha 2b
CDLPQTHSLGSRRTLMLLAQMRRISLFSCLKDHHDFGFPQEEFGNQFQKAETIPVLHEMIQQIFNLFSTKDSSAAWDETLLDKFYTELYQQLNDLEACVIQGVGVTETPLMKEDSILAVRKYFQRITLYLKEKKYSPCAWEVVRAEIMRSFSLSTNLQESLRSKE

SEQ ID NO: 87 - protein, 165 aa, Artificial Sequence
  E41Q Mutant INF-alpha 2b
CDLPQTHSLGSRRTLMLLAQMRRISLFSCLKDRHDFGFPQQEFGNQFQKAETIPVLHEMIQQIFNLFSTKDSSAAWDETLLDKFYTELYQQLNDLEACVIQGVGVTETPLMKEDSILAVRKYFQRITLYLKEKKYSPCAWEVVRAEIMRSFSLSTNLQESLRSKE

SEQ ID NO: 88 - protein, 165 aa, Artificial Sequence
  E41H Mutant INF-alpha 2b
CDLPQTHSLGSRRTLMLLAQMRRISLFSCLKDRHDFGFPQHEFGNQFQKAETIPVLHEMIQQIFNLFSTKDSSAAWDETLLDKFYTELYQQLNDLEACVIQGVGVTETPLMKEDSILAVRKYFQRITLYLKEKKYSPCAWEVVRAEIMRSFSLSTNLQESLRSKE

SEQ ID NO: 89 - protein, 165 aa, Artificial Sequence
  E58Q Mutant INF-alpha 2b
CDLPQTHSLGSRRTLMLLAQMRRISLFSCLKDRHDFGFPQEEFGNQFQKAETIPVLHQMIQQIFNLFSTKDSSAAWDETLLDKFYTELYQQLNDLEACVIQGVGVTETPLMKEDSILAVRKYFQRITLYLKEKKYSPCAWEVVRAEIMRSFSLSTNLQESLRSKE

SEQ ID NO: 90 - protein, 165 aa, Artificial Sequence
  E58H Mutant INF-alpha 2b
CDLPQTHSLGSRRTLMLLAQMRRISLFSCLKDRHDFGFPQEEFGNQFQKAETIPVLHHMIQQIFNLFSTKDSSAAWDETLLDKFYTELYQQLNDLEACVIQGVGVTETPLMKEDSILAVRKYFQRITLYLKEKKYSPCAWEVVRAEIMRSFSLSTNLQESLRSKE

SEQ ID NO: 91 - protein, 165 aa, Artificial Sequence
  K70T Mutant INF-alpha 2b
CDLPQTHSLGSRRTLMLLAQMRRISLFSCLKDRHDFGFPQEEFGNQFQKAETIPVLHEMIQQIFNLFSTTDSSAAWDETLLDKFYTELYQQLNDLEACVIQGVGVTETPLMKEDSILAVRKYFQRITLYLKEKKYSPCAWEVVRAEIMRSFSLSTNLQESLRSKE

SEQ ID NO: 92 - protein, 165 aa, Artificial Sequence
  E78Q Mutant INF-alpha 2b
CDLPQTHSLGSRRTLMLLAQMRRISLFSCLKDRHDFGFPQEEFGNQFQKAETIPVLHEMIQQIFNLFSTKDSSAAWDQTLLDKFYTELYQQLNDLEACVIQGVGVTETPLMKEDSILAVRKYFQRITLYLKEKKYSPCAWEVVRAEIMRSFSLSTNLQESLRSKE

SEQ ID NO: 93 - protein, 165 aa, Artificial Sequence
  E78H Mutant INF-alpha 2b
CDLPQTHSLGSRRTLMLLAQMRRISLFSCLKDRHDFGFPQEEFGNQFQKAETIPVLHEMIQQIFNLFSTKDSSAAWDHTLLDKFYTELYQQLNDLEACVIQGVGVTETPLMKEDSILAVRKYFQRITLYLKEKKYSPCAWEVVRAEIMRSFSLSTNLQESLRSKE

SEQ ID NO: 94 - protein, 165 aa, Artificial Sequence
  Y89I Mutant INF-alpha 2b
CDLPQTHSLGSRRTLMLLAQMRRISLFSCLKDRHDFGFPQEEFGNQFQKAETIPVLHEMIQQIFNLFSTKDSSAAWDETLLDKFYTELIQQLNDLEACVIQGVGVTETPLMKEDSILAVRKYFQRITLYLKEKKYSPCAWEVVRAEIMRSFSLSTNLQESLRSKE

SEQ ID NO: 95 - protein, 165 aa, Artificial Sequence
  E107Q Mutant INF-alpha 2b
CDLPQTHSLGSRRTLMLLAQMRRISLFSCLKDRHDFGFPQEEFGNQFQKAETIPVLHEMIQQIFNLFSTKDSSAAWDETLLDKFYTELYQQLNDLEACVIQGVGVTQTPLMKEDSILAVRKYFQRITLYLKEKKYSPCAWEVVRAEIMRSFSLSTNLQESLRSKE

SEQ ID NO: 96 - protein, 165 aa, Artificial Sequence
  E107H Mutant INF-alpha 2b
CDLPQTHSLGSRRTLMLLAQMRRISLFSCLKDRHDFGFPQEEFGNQFQKAETIPVLHEMIQQIFNLFSTKDSSAAWDETLLDKFYTELYQQLNDLEACVIQGVGVTHTPLMKEDSILAVRKYFQRITLYLKEKKYSPCAWEVVRAEIMRSFSLSTNLQESLRSKE

SEQ ID NO: 97 - protein, 165 aa, Artificial Sequence
  P109A Mutant INF-alpha 2b
CDLPQTHSLGSRRTLMLLAQMRRISLFSCLKDRHDFGFPQEEFGNQFQKAETIPVLHEMIQQIFNLFSTKDSSAAWDETLLDKFYTELYQQLNDLEACVIQGVGVTETALMKEDSILAVRKYFQRITLYLKEKKYSPCAWEVVRAEIMRSFSLSTNLQESLRSKE

SEQ ID NO: 98 - protein, 165 aa, Artificial Sequence
  L110V Mutant INF-alpha 2b
CDLPQTHSLGSRRTLMLLAQMRRISLFSCLKDRHDFGFPQEEFGNQFQKAETIPVLHEMIQQIFNLFSTKDSSAAWDETLLDKFYTELYQQLNDLEACVIQGVGVTETPVMKEDSILAVRKYFQRITLYLKEKKYSPCAWEVVRAEIMRSFSLSTNLQESLRSKE

SEQ ID NO: 99 - protein, 165 aa, Artificial Sequence
  M111I Mutant INF-alpha 2b
CDLPQTHSLGSRRTLMLLAQMRRISLFSCLKDRHDFGFPQEEFGNQFQKAETIPVLHEMIQQIFNLFSTKDSSAAWDETLLDKFYTELYQQLNDLEACVIQGVGVTETPLIKEDSILAVRKYFQRITLYLKEKKYSPCAWEVVRAEIMRSFSLSTNLQESLRSKE

SEQ ID NO: 100 - protein, 165 aa, Artificial Sequence
  E113Q Mutant INF-alpha 2b
CDLPQTHSLGSRRTLMLLAQMRRISLFSCLKDRHDFGFPQEEFGNQFQKAETIPVLHEMIQQIFNLFSTKDSSAAWDETLLDKFYTELYQQLNDLEACVIQGVGVTETPLMKQDSILAVRKYFQRITLYLKEKKYSPCAWEVVRAEIMRSFSLSTNLQESLRSKE

SEQ ID NO: 101 - protein, 165 aa, Artificial Sequence
  E113H Mutant INF-alpha 2b
CDLPQTHSLGSRRTLMLLAQMRRISLFSCLKDRHDFGFPQEEFGNQFQKAETIPVLHEMIQQIFNLFSTKDSSAAWDETLLDKFYTELYQQLNDLEACVIQGVGVTETPLMKHDSILAVRKYFQRITLYLKEKKYSPCAWEVVRAEIMRSFSLSTNLQESLRSKE

SEQ ID NO: 102 - protein, 165 aa, Artificial Sequence
  L117V Mutant INF-alpha 2b
CDLPQTHSLGSRRTLMLLAQMRRISLFSCLKDRHDFGFPQEEFGNQFQKAETIPVLHEMIQQIFNLFSTKDSSAAWDETLLDKFYTELYQQLNDLEACVIQGVGVTETPLMKEDSIVAVRKYFQRITLYLKEKKYSPCAWEVVRAEIMRSFSLSTNLQESLRSKE

SEQ ID NO: 103 - protein, 165 aa, Artificial Sequence
  L117I Mutant INF-alpha 2b
CDLPQTHSLGSRRTLMLLAQMRRISLFSCLKDRHDFGFPQEEFGNQFQKAETIPVLHEMIQQIFNLFSTKDSSAAWDETLLDKFYTELYQQLNDLEACVIQGVGVTETPLMKEDSIIAVRKYFQRITLYLKEKKYSPCAWEVVRAEIMRSFSLSTNLQESLRSKE

SEQ ID NO: 104 - protein, 165 aa, Artificial Sequence
  K121Q Mutant INF-alpha 2b
CDLPQTHSLGSRRTLMLLAQMRRISLFSCLKDRHDFGFPQEEFGNQFQKAETIPVLHEMIQQIFNLFSTKDSSAAWDETLLDKFYTELYQQLNDLEACVIQGVGVTETPLMKEDSILAVRQYFQRITLYLKEKKYSPCAWEVVRAEIMRSFSLSTNLQESLRSKE

SEQ ID NO: 105 - protein, 165 aa, Artificial Sequence
  K121T Mutant INF-alpha 2b
CDLPQTHSLGSRRTLMLLAQMRRISLFSCLKDRHDFGFPQEEFGNQFQKAETIPVLHEMIQQIFNLFSTKDSSAAWDETLLDKFYTELYQQLNDLEACVIQGVGVTETPLMKEDSILAVRTYFQRITLYLKEKKYSPCAWEVVRAEIMRSFSLSTNLQESLRSKE

SEQ ID NO: 106 - protein, 165 aa, Artificial Sequence
  R125H Mutant INF-alpha 2b
CDLPQTHSLGSRRTLMLLAQMRRISLFSCLKDRHDFGFPQEEFGNQFQKAETIPVLHEMIQQIFNLFSTKDSSAAWDETLLDKFYTELYQQLNDLEACVIQGVGVTETPLMKEDSILAVRKYFQHITLYLKEKKYSPCAWEVVRAEIMRSFSLSTNLQESLRSKE

SEQ ID NO: 107 - protein, 165 aa, Artificial Sequence
  R125Q Mutant INF-alpha 2b
CDLPQTHSLGSRRTLMLLAQMRRISLFSCLKDRHDFGFPQEEFGNQFQKAETIPVLHEMIQQIFNLFSTKDSSAAWDETLLDKFYTELYQQLNDLEACVIQGVGVTETPLMKEDSILAVRKYFQQITLYLKEKKYSPCAWEVVRAEIMRSFSLSTNLQESLRSKE

SEQ ID NO: 108 - protein, 165 aa, Artificial Sequence
  L128V Mutant INF-alpha 2b
CDLPQTHSLGSRRTLMLLAQMRRISLFSCLKDRHDFGFPQEEFGNQFQKAETIPVLHEMIQQIFNLFSTKDSSAAWDETLLDKFYTELYQQLNDLEACVIQGVGVTETPLMKEDSILAVRKYFQRITVYLKEKKYSPCAWEVVRAEIMRSFSLSTNLQESLRSKE

SEQ ID NO: 109 - protein, 165 aa, Artificial Sequence
  L128I Mutant INF-alpha 2b
CDLPQTHSLGSRRTLMLLAQMRRISLFSCLKDRHDFGFPQEEFGNQFQKAETIPVLHEMIQQIFNLFSTKDSSAAWDETLLDKFYTELYQQLNDLEACVIQGVGVTETPLMKEDSILAVRKYFQRITIYLKEKKYSPCAWEVVRAEIMRSFSLSTNLQESLRSKE

SEQ ID NO: 110 - protein, 165 aa, Artificial Sequence
  K131Q Mutant INF-alpha 2b
CDLPQTHSLGSRRTLMLLAQMRRISLFSCLKDRHDFGFPQEEFGNQFQKAETIPVLHEMIQQIFNLFSTKDSSAAWDETLLDKFYTELYQQLNDLEACVIQGVGVTETPLMKEDSILAVRKYFQRITLYLQEKKYSPCAWEVVRAEIMRSFSLSTNLQESLRSKE

SEQ ID NO: 111 - protein, 165 aa, Artificial Sequence
  K131T Mutant INF-alpha 2b
CDLPQTHSLGSRRTLMLLAQMRRISLFSCLKDRHDFGFPQEEFGNQFQKAETIPVLHEMIQQIFNLFSTKDSSAAWDETLLDKFYTELYQQLNDLEACVIQGVGVTETPLMKEDSILAVRKYFQRITLYLTEKKYSPCAWEVVRAEIMRSFSLSTNLQESLRSKE

SEQ ID NO: 112 - protein, 165 aa, Artificial Sequence
  E132Q Mutant INF-alpha 2b
CDLPQTHSLGSRRTLMLLAQMRRISLFSCLKDRHDFGFPQEEFGNQFQKAETIPVLHEMIQQIFNLFSTKDSSAAWDETLLDKFYTELYQQLNDLEACVIQGVGVTETPLMKEDSILAVRKYFQRITLYLKQKKYSPCAWEVVRAEIMRSFSLSTNLQESLRSKE

SEQ ID NO: 113 - protein, 165 aa, Artificial Sequence
  E132H Mutant INF-alpha 2b
CDLPQTHSLGSRRTLMLLAQMRRISLFSCLKDRHDFGFPQEEFGNQFQKAETIPVLHEMIQQIFNLFSTKDSSAAWDETLLDKFYTELYQQLNDLEACVIQGVGVTETPLMKEDSILAVRKYFQRITLYLKHKKYSPCAWEVVRAEIMRSFSLSTNLQESLRSKE

SEQ ID NO: 114 - protein, 165 aa, Artificial Sequence
  K133Q Mutant INF-alpha 2b
CDLPQTHSLGSRRTLMLLAQMRRISLFSCLKDRHDFGFPQEEFGNQFQKAETIPVLHEMIQQIFNLFSTKDSSAAWDETLLDKFYTELYQQLNDLEACVIQGVGVTETPLMKEDSILAVRKYFQRITLYLKEQKYSPCAWEVVRAEIMRSFSLSTNLQESLRSKE

SEQ ID NO: 115 - protein, 165 aa, Artificial Sequence
  K133T Mutant INF-alpha 2b
CDLPQTHSLGSRRTLMLLAQMRRISLFSCLKDRHDFGFPQEEFGNQFQKAETIPVLHEMIQQIFNLFSTKDSSAAWDETLLDKFYTELYQQLNDLEACVIQGVGVTETPLMKEDSILAVRKYFQRITLYLKETKYSPCAWEVVRAEIMRSFSLSTNLQESLRSKE

SEQ ID NO: 116 - protein, 165 aa, Artificial Sequence
  K134Q Mutant INF-alpha 2b
CDLPQTHSLGSRRTLMLLAQMRRISLFSCLKDRHDFGFPQEEFGNQFQKAETIPVLHEMIQQIFNLFSTKDSSAAWDETLLDKFYTELYQQLNDLEACVIQGVGVTETPLMKEDSILAVRKYFQRITLYLKEKQYSPCAWEVVRAEIMRSFSLSTNLQESLRSKE

SEQ ID NO: 117 - protein, 165 aa, Artificial Sequence
  Y135H Mutant INF-alpha 2b
CDLPQTHSLGSRRTLMLLAQMRRISLFSCLKDRHDFGFPQEEFGNQFQKAETIPVLHEMIQQIFNLFSTKDSSAAWDETLLDKFYTELYQQLNDLEACVIQGVGVTETPLMKEDSILAVRKYFQRITLYLKEKKHSPCAWEVVRAEIMRSFSLSTNLQESLRSKE

SEQ ID NO: 118 - protein, 165 aa, Artificial Sequence
  Y135I Mutant INF-alpha 2b
CDLPQTHSLGSRRTLMLLAQMRRISLFSCLKDRHDFGFPQEEFGNQFQKAETIPVLHEMIQQIFNLFSTKDSSAAWDETLLDKFYTELYQQLNDLEACVIQGVGVTETPLMKEDSILAVRKYFQRITLYLKEKKISPCAWEVVRAEIMRSFSLSTNLQESLRSKE

SEQ ID NO: 119 - protein, 165 aa, Artificial Sequence
  P137A Mutant INF-alpha 2b
CDLPQTHSLGSRRTLMLLAQMRRISLFSCLKDRHDFGFPQEEFGNQFQKAETIPVLHEMIQQIFNLFSTKDSSAAWDETLLDKFYTELYQQLNDLEACVIQGVGVTETPLMKEDSILAVRKYFQRITLYLKEKKYSACAWEVVRAEIMRSFSLSTNLQESLRSKE

SEQ ID NO: 120 - protein, 165 aa, Artificial Sequence
  M148V Mutant INF-alpha 2b
CDLPQTHSLGSRRTLMLLAQMRRISLFSCLKDRHDFGFPQEEFGNQFQKAETIPVLHEMIQQIFNLFSTKDSSAAWDETLLDKFYTELYQQLNDLEACVIQGVGVTETPLMKEDSILAVRKYFQRITLYLKEKKYSPCAWEVVRAEIVRSFSLSTNLQESLRSKE

SEQ ID NO: 121 - protein, 165 aa, Artificial Sequence
  M148I Mutant INF-alpha 2b
CDLPQTHSLGSRRTLMLLAQMRRISLFSCLKDRHDFGFPQEEFGNQFQKAETIPVLHEMIQQIFNLFSTKDSSAAWDETLLDKFYTELYQQLNDLEACVIQGVGVTETPLMKEDSILAVRKYFQRITLYLKEKKYSPCAWEVVRAEIIRSFSLSTNLQESLRSKE

SEQ ID NO: 122 - protein, 165 aa, Artificial Sequence
  R149H Mutant INF-alpha 2b
CDLPQTHSLGSRRTLMLLAQMRRISLFSCLKDRHDFGFPQEEFGNQFQKAETIPVLHEMIQQIFNLFSTKDSSAAWDETLLDKFYTELYQQLNDLEACVIQGVGVTETPLMKEDSILAVRKYFQRITLYLKEKKYSPCAWEVVRAEIMHSFSLSTNLQESLRSKE

SEQ ID NO: 123 - protein, 165 aa, Artificial Sequence
  R149Q Mutant INF-alpha 2b
CDLPQTHSLGSRRTLMLLAQMRRISLFSCLKDRHDFGFPQEEFGNQFQKAETIPVLHEMIQQIFNLFSTKDSSAAWDETLLDKFYTELYQQLNDLEACVIQGVGVTETPLMKEDSILAVRKYFQRITLYLKEKKYSPCAWEVVRAEIMQSFSLSTNLQESLRSKE

SEQ ID NO: 124 - protein, 165 aa, Artificial Sequence
  E159Q Mutant INF-alpha 2b
CDLPQTHSLGSRRTLMLLAQMRRISLFSCLKDRHDFGFPQEEFGNQFQKAETIPVLHEMIQQIFNLFSTKDSSAAWDETLLDKFYTELYQQLNDLEACVIQGVGVTETPLMKEDSILAVRKYFQRITLYLKEKKYSPCAWEVVRAEIMRSFSLSTNLQQSLRSKE

SEQ ID NO: 125 - protein, 165 aa, Artificial Sequence
  E159H Mutant INF-alpha 2b
CDLPQTHSLGSRRTLMLLAQMRRISLFSCLKDRHDFGFPQEEFGNQFQKAETIPVLHEMIQQIFNLFSTKDSSAAWDETLLDKFYTELYQQLNDLEACVIQGVGVTETPLMKEDSILAVRKYFQRITLYLKEKKYSPCAWEVVRAEIMRSFSLSTNLQHSLRSKE

SEQ ID NO: 126 - protein, 165 aa, Artificial Sequence
  P4S Mutant INF-alpha 2b
CDLSQTHSLGSRRTLMLLAQMRRISLFSCLKDRHDFGFPQEEFGNQFQKAETIPVLHEMIQQIFNLFSTKDSSAAWDETLLDKFYTELYQQLNDLEACVIQGVGVTETPLMKEDSILAVRKYFQRITLYLKEKKYSPCAWEVVRAEIMRSFSLSTNLQESLRSKE

SEQ ID NO: 127 - protein, 165 aa, Artificial Sequence
  Q5N/H7S Mutant INF-alpha 2b
CDLPNTSSLGSRRTLMLLAQMRRISLFSCLKDRHDFGFPQEEFGNQFQKAETIPVLHEMIQQIFNLFSTKDSSAAWDETLLDKFYTELYQQLNDLEACVIQGVGVTETPLMKEDSILAVRKYFQRITLYLKEKKYSPCAWEVVRAEIMRSFSLSTNLQESLRSKE

SEQ ID NO: 128 - protein, 165 aa, Artificial Sequence
  Q5N/H7T Mutant INF-alpha 2b
CDLPNTTSLGSRRTLMLLAQMRRISLFSCLKDRHDFGFPQEEFGNQFQKAETIPVLHEMIQQIFNLFSTKDSSAAWDETLLDKFYTELYQQLNDLEACVIQGVGVTETPLMKEDSILAVRKYFQRITLYLKEKKYSPCAWEVVRAEIMRSFSLSTNLQESLRSKE

SEQ ID NO: 129 - protein, 165 aa, Artificial Sequence
  T6N/S8S Mutant INF-alpha 2b
CDLPQNHSLGSRRTLMLLAQMRRISLFSCLKDRHDFGFPQEEFGNQFQKAETIPVLHEMIQQIFNLFSTKDSSAAWDETLLDKFYTELYQQLNDLEACVIQGVGVTETPLMKEDSILAVRKYFQRITLYLKEKKYSPCAWEVVRAEIMRSFSLSTNLQESLRSKE

SEQ ID NO: 130 - protein, 165 aa, Artificial Sequence
  S8N/G10S Mutant INF-alpha 2b
CDLPQTHNLSSRRTLMLLAQMRRISLFSCLKDRHDFGFPQEEFGNQFQKAETIPVLHEMIQQIFNLFSTKDSSAAWDETLLDKFYTELYQQLNDLEACVIQGVGVTETPLMKEDSILAVRKYFQRITLYLKEKKYSPCAWEVVRAEIMRSFSLSTNLQESLRSKE

SEQ ID NO: 131 - protein, 165 aa, Artificial Sequence
  S8N/G10T Mutant INF-alpha 2b
CDLPQTHNLTSRRTLMLLAQMRRISLFSCLKDRHDFGFPQEEFGNQFQKAETIPVLHEMIQQIFNLFSTKDSSAAWDETLLDKFYTELYQQLNDLEACVIQGVGVTETPLMKEDSILAVRKYFQRITLYLKEKKYSPCAWEVVRAEIMRSFSLSTNLQESLRSKE

SEQ ID NO: 132 - protein, 165 aa, Artificial Sequence
  M21N/R23S Mutant INF-alpha 2b
CDLPQTHSLGSRRTLMLLAQNRSISLFSCLKDRHDFGFPQEEFGNQFQKAETIPVLHEMIQQIFNLFSTKDSSAAWDETLLDKFYTELYQQLNDLEACVIQGVGVTETPLMKEDSILAVRKYFQRITLYLKEKKYSPCAWEVVRAEIMRSFSLSTNLQESLRSKE

SEQ ID NO: 133 - protein, 165 aa, Artificial Sequence
  R23N/S25T Mutant INF-alpha 2b
CDLPQTHSLGSRRTLMLLAQMRNITLFSCLKDRHDFGFPQEEFGNQFQKAETIPVLHEMIQQIFNLFSTKDSSAAWDETLLDKFYTELYQQLNDLEACVIQGVGVTETPLMKEDSILAVRKYFQRITLYLKEKKYSPCAWEVVRAEIMRSFSLSTNLQESLRSKE

SEQ ID NO: 134 - protein, 165 aa, Artificial Sequence
  I24N/L26S Mutant INF-alpha 2b
CDLPQTHSLGSRRTLMLLAQMRRNSSFSCLKDRHDFGFPQEEFGNQFQKAETIPVLHEMIQQIFNLFSTKDSSAAWDETLLDKFYTELYQQLNDLEACVIQGVGVTETPLMKEDSILAVRKYFQRITLYLKEKKYSPCAWEVVRAEIMRSFSLSTNLQESLRSKE

SEQ ID NO: 135 - protein, 165 aa, Artificial Sequence
  S25N/F27S Mutant INF-alpha 2b
CDLPQTHSLGSRRTLMLLAQMRRINLSSCLKDRHDFGFPQEEFGNQFQKAETIPVLHEMIQQIFNLFSTKDSSAAWDETLLDKFYTELYQQLNDLEACVIQGVGVTETPLMKEDSILAVRKYFQRITLYLKEKKYSPCAWEVVRAEIMRSFSLSTNLQESLRSKE

SEQ ID NO: 136 - protein, 165 aa, Artificial Sequence
  S25N/F27T Mutant INF-alpha 2b
CDLPQTHSLGSRRTLMLLAQMRRINLTSCLKDRHDFGFPQEEFGNQFQKAETIPVLHEMIQQIFNLFSTKDSSAAWDETLLDKFYTELYQQLNDLEACVIQGVGVTETPLMKEDSILAVRKYFQRITLYLKEKKYSPCAWEVVRAEIMRSFSLSTNLQESLRSKE

SEQ ID NO: 137 - protein, 165 aa, Artificial Sequence
  L26N/S28S Mutant INF-alpha 2b
CDLPQTHSLGSRRTLMLLAQMRRISNFSCLKDRHDFGFPQEEFGNQFQKAETIPVLHEMIQQIFNLFSTKDSSAAWDETLLDKFYTELYQQLNDLEACVIQGVGVTETPLMKEDSILAVRKYFQRITLYLKEKKYSPCAWEVVRAEIMRSFSLSTNLQESLRSKE

SEQ ID NO: 138 - protein, 165 aa, Artificial Sequence
  L26N/S28T Mutant INF-alpha 2b
CDLPQTHSLGSRRTLMLLAQMRRISNFTCLKDRHDFGFPQEEFGNQFQKAETIPVLHEMIQQIFNLFSTKDSSAAWDETLLDKFYTELYQQLNDLEACVIQGVGVTETPLMKEDSILAVRKYFQRITLYLKEKKYSPCAWEVVRAEIMRSFSLSTNLQESLRSKE

SEQ ID NO: 139 - protein, 165 aa, Artificial Sequence
  L30N/D32S Mutant INF-alpha 2b
CDLPQTHSLGSRRTLMLLAQMRRISLFSCNKSRHDFGFPQEEFGNQFQKAETIPVLHEMIQQIFNLFSTKDSSAAWDETLLDKFYTELYQQLNDLEACVIQGVGVTETPLMKEDSILAVRKYFQRITLYLKEKKYSPCAWEVVRAEIMRSFSLSTNLQESLRSKE

SEQ ID NO: 140 - protein, 165 aa, Artificial Sequence
  R33N/D35S Mutant INF-alpha 2b
CDLPQTHSLGSRRTLMLLAQMRRISLFSCLKDNHSFGFPQEEFGNQFQKAETIPVLHEMIQQIFNLFSTKDSSAAWDETLLDKFYTELYQQLNDLEACVIQGVGVTETPLMKEDSILAVRKYFQRITLYLKEKKYSPCAWEVVRAEIMRSFSLSTNLQESLRSKE

SEQ ID NO: 141 - protein, 165 aa, Artificial Sequence
  R33N/D35T Mutant INF-alpha 2b
CDLPQTHSLGSRRTLMLLAQMRRISLFSCLKDNHTFGFPQEEFGNQFQKAETIPVLHEMIQQIFNLFSTKDSSAAWDETLLDKFYTELYQQLNDLEACVIQGVGVTETPLMKEDSILAVRKYFQRITLYLKEKKYSPCAWEVVRAEIMRSFSLSTNLQESLRSKE

SEQ ID NO: 142 - protein, 165 aa, Artificial Sequence
  H34N/F36S Mutant INF-alpha 2b
CDLPQTHSLGSRRTLMLLAQMRRISLFSCLKDRNDSGFPQEEFGNQFQKAETIPVLHEMIQQIFNLFSTKDSSAAWDETLLDKFYTELYQQLNDLEACVIQGVGVTETPLMKEDSILAVRKYFQRITLYLKEKKYSPCAWEVVRAEIMRSFSLSTNLQESLRSKE

SEQ ID NO: 143 - protein, 165 aa, Artificial Sequence
  H34N/F36T Mutant INF-alpha 2b
CDLPQTHSLGSRRTLMLLAQMRRISLFSCLKDRNDTGFPQEEFGNQFQKAETIPVLHEMIQQIFNLFSTKDSSAAWDETLLDKFYTELYQQLNDLEACVIQGVGVTETPLMKEDSILAVRKYFQRITLYLKEKKYSPCAWEVVRAEIMRSFSLSTNLQESLRSKE

SEQ ID NO: 144 - protein, 165 aa, Artificial Sequence
  D35N/G37S Mutant INF-alpha 2b
CDLPQTHSLGSRRTLMLLAQMRRISLFSCLKDRHNFSFPQEEFGNQFQKAETIPVLHEMIQQIFNLFSTKDSSAAWDETLLDKFYTELYQQLNDLEACVIQGVGVTETPLMKEDSILAVRKYFQRITLYLKEKKYSPCAWEVVRAEIMRSFSLSTNLQESLRSKE

SEQ ID NO: 145 - protein, 165 aa, Artificial Sequence
  F36N/F38S Mutant INF-alpha 2b
CDLPQTHSLGSRRTLMLLAQMRRISLFSCLKDRHDNGSPQEEFGNQFQKAETIPVLHEMIQQIFNLFSTKDSSAAWDETLLDKFYTELYQQLNDLEACVIQGVGVTETPLMKEDSILAVRKYFQRITLYLKEKKYSPCAWEVVRAEIMRSFSLSTNLQESLRSKE

SEQ ID NO: 146 - protein, 165 aa, Artificial Sequence
  F36N/F38T Mutant INF-alpha 2b
CDLPQTHSLGSRRTLMLLAQMRRISLFSCLKDRHDNGTPQEEFGNQFQKAETIPVLHEMIQQIFNLFSTKDSSAAWDETLLDKFYTELYQQLNDLEACVIQGVGVTETPLMKEDSILAVRKYFQRITLYLKEKKYSPCAWEVVRAEIMRSFSLSTNLQESLRSKE

SEQ ID NO: 147 - protein, 165 aa, Artificial Sequence
  G37N/P39T Mutant INF-alpha 2b
CDLPQTHSLGSRRTLMLLAQMRRISLFSCLKDRHDFNFTQEEFGNQFQKAETIPVLHEMIQQIFNLFSTKDSSAAWDETLLDKFYTELYQQLNDLEACVIQGVGVTETPLMKEDSILAVRKYFQRITLYLKEKKYSPCAWEVVRAEIMRSFSLSTNLQESLRSKE

SEQ ID NO: 148 - protein, 165 aa, Artificial Sequence
  F38N/Q40S Mutant INF-alpha 2b
CDLPQTHSLGSRRTLMLLAQMRRISLFSCLKDRHDFGNPSEEFGNQFQKAETIPVLHEMIQQIFNLFSTKDSSAAWDETLLDKFYTELYQQLNDLEACVIQGVGVTETPLMKEDSILAVRKYFQRITLYLKEKKYSPCAWEVVRAEIMRSFSLSTNLQESLRSKE

SEQ ID NO: 149 - protein, 165 aa, Artificial Sequence
  F38N/Q40T Mutant INF-alpha 2b
CDLPQTHSLGSRRTLMLLAQMRRISLFSCLKDRHDFGNPTEEFGNQFQKAETIPVLHEMIQQIFNLFSTKDSSAAWDETLLDKFYTELYQQLNDLEACVIQGVGVTETPLMKEDSILAVRKYFQRITLYLKEKKYSPCAWEVVRAEIMRSFSLSTNLQESLRSKE

SEQ ID NO: 150 - protein, 165 aa, Artificial Sequence
  P39N/E41S Mutant INF-alpha 2b
CDLPQTHSLGSRRTLMLLAQMRRISLFSCLKDRHDFGFNQSEFGNQFQKAETIPVLHEMIQQIFNLFSTKDSSAAWDETLLDKFYTELYQQLNDLEACVIQGVGVTETPLMKEDSILAVRKYFQRITLYLKEKKYSPCAWEVVRAEIMRSFSLSTNLQESLRSKE

SEQ ID NO: 151 - protein, 165 aa, Artificial Sequence
  P39N/E41T Mutant INF-alpha 2b
CDLPQTHSLGSRRTLMLLAQMRRISLFSCLKDRHDFGFNQTEFGNQFQKAETIPVLHEMIQQIFNLFSTKDSSAAWDETLLDKFYTELYQQLNDLEACVIQGVGVTETPLMKEDSILAVRKYFQRITLYLKEKKYSPCAWEVVRAEIMRSFSLSTNLQESLRSKE

SEQ ID NO: 152 - protein, 165 aa, Artificial Sequence
  Q40N/E42S Mutant INF-alpha 2b
CDLPQTHSLGSRRTLMLLAQMRRISLFSCLKDRHDFGFPNESFGNQFQKAETIPVLHEMIQQIFNLFSTKDSSAAWDETLLDKFYTELYQQLNDLEACVIQGVGVTETPLMKEDSILAVRKYFQRITLYLKEKKYSPCAWEVVRAEIMRSFSLSTNLQESLRSKE

SEQ ID NO: 153 - protein, 165 aa, Artificial Sequence
  Q40N/E42T Mutant INF-alpha 2b
CDLPQTHSLGSRRTLMLLAQMRRISLFSCLKDRHDFGFPNETFGNQFQKAETIPVLHEMIQQIFNLFSTKDSSAAWDETLLDKFYTELYQQLNDLEACVIQGVGVTETPLMKEDSILAVRKYFQRITLYLKEKKYSPCAWEVVRAEIMRSFSLSTNLQESLRSKE

SEQ ID NO: 154 - protein, 165 aa, Artificial Sequence
  E41N/F43S Mutant INF-alpha 2b
CDLPQTHSLGSRRTLMLLAQMRRISLFSCLKDRHDFGFPQNESGNQFQKAETIPVLHEMIQQIFNLFSTKDSSAAWDETLLDKFYTELYQQLNDLEACVIQGVGVTETPLMKEDSILAVRKYFQRITLYLKEKKYSPCAWEVVRAEIMRSFSLSTNLQESLRSKE

SEQ ID NO: 155 - protein, 165 aa, Artificial Sequence
  E41N/F43T Mutant INF-alpha 2b
CDLPQTHSLGSRRTLMLLAQMRRISLFSCLKDRHDFGFPQNETGNQFQKAETIPVLHEMIQQIFNLFSTKDSSAAWDETLLDKFYTELYQQLNDLEACVIQGVGVTETPLMKEDSILAVRKYFQRITLYLKEKKYSPCAWEVVRAEIMRSFSLSTNLQESLRSKE

SEQ ID NO: 156 - protein, 165 aa, Artificial Sequence
  G44N/Q46S Mutant INF-alpha 2b
CDLPQTHSLGSRRTLMLLAQMRRISLFSCLKDRHDFGFPQEEFNNSFQKAETIPVLHEMIQQIFNLFSTKDSSAAWDETLLDKFYTELYQQLNDLEACVIQGVGVTETPLMKEDSILAVRKYFQRITLYLKEKKYSPCAWEVVRAEIMRSFSLSTNLQESLRSKE

SEQ ID NO: 157 - protein, 165 aa, Artificial Sequence
  G44N/Q46T Mutant INF-alpha 2b
CDLPQTHSLGSRRTLMLLAQMRRISLFSCLKDRHDFGFPQEEFNNTFQKAETIPVLHEMIQQIFNLFSTKDSSAAWDETLLDKFYTELYQQLNDLEACVIQGVGVTETPLMKEDSILAVRKYFQRITLYLKEKKYSPCAWEVVRAEIMRSFSLSTNLQESLRSKE

SEQ ID NO: 158 - protein, 165 aa, Artificial Sequence
  N45N/F47S Mutant INF-alpha 2b
CDLPQTHSLGSRRTLMLLAQMRRISLFSCLKDRHDFGFPQEEFGNQSQKAETIPVLHEMIQQIFNLFSTKDSSAAWDETLLDKFYTELYQQLNDLEACVIQGVGVTETPLMKEDSILAVRKYFQRITLYLKEKKYSPCAWEVVRAEIMRSFSLSTNLQESLRSKE

SEQ ID NO: 159 - protein, 165 aa, Artificial Sequence
  N45N/F47T Mutant INF-alpha 2b
CDLPQTHSLGSRRTLMLLAQMRRISLFSCLKDRHDFGFPQEEFGNQTQKAETIPVLHEMIQQIFNLFSTKDSSAAWDETLLDKFYTELYQQLNDLEACVIQGVGVTETPLMKEDSILAVRKYFQRITLYLKEKKYSPCAWEVVRAEIMRSFSLSTNLQESLRSKE

SEQ ID NO: 160 - protein, 165 aa, Artificial Sequence
  Q46N/Q48S Mutant INF-alpha 2b
CDLPQTHSLGSRRTLMLLAQMRRISLFSCLKDRHDFGFPQEEFGNNFSKAETIPVLHEMIQQIFNLFSTKDSSAAWDETLLDKFYTELYQQLNDLEACVIQGVGVTETPLMKEDSILAVRKYFQRITLYLKEKKYSPCAWEVVRAEIMRSFSLSTNLQESLRSKE

SEQ ID NO: 161 - protein, 165 aa, Artificial Sequence
  Q46N/Q48T Mutant INF-alpha 2b
CDLPQTHSLGSRRTLMLLAQMRRISLFSCLKDRHDFGFPQEEFGNNFTKAETIPVLHEMIQQIFNLFSTKDSSAAWDETLLDKFYTELYQQLNDLEACVIQGVGVTETPLMKEDSILAVRKYFQRITLYLKEKKYSPCAWEVVRAEIMRSFSLSTNLQESLRSKE

SEQ ID NO: 162 - protein, 165 aa, Artificial Sequence
  F47N/K49S Mutant INF-alpha 2b
CDLPQTHSLGSRRTLMLLAQMRRISLFSCLKDRHDFGFPQEEFGNQNQSAETIPVLHEMIQQIFNLFSTKDSSAAWDETLLDKFYTELYQQLNDLEACVIQGVGVTETPLMKEDSILAVRKYFQRITLYLKEKKYSPCAWEVVRAEIMRSFSLSTNLQESLRSKE

SEQ ID NO: 163 - protein, 165 aa, Artificial Sequence
  F47N/K49T Mutant INF-alpha 2b
CDLPQTHSLGSRRTLMLLAQMRRISLFSCLKDRHDFGFPQEEFGNQNQTAETIPVLHEMIQQIFNLFSTKDSSAAWDETLLDKFYTELYQQLNDLEACVIQGVGVTETPLMKEDSILAVRKYFQRITLYLKEKKYSPCAWEVVRAEIMRSFSLSTNLQESLRSKE

SEQ ID NO: 164 - protein, 165 aa, Artificial Sequence
  K49N/E51S Mutant INF-alpha 2b
CDLPQTHSLGSRRTLMLLAQMRRISLFSCLKDRHDFGFPQEEFGNQFQNASTIPVLHEMIQQIFNLFSTKDSSAAWDETLLDKFYTELYQQLNDLEACVIQGVGVTETPLMKEDSILAVRKYFQRITLYLKEKKYSPCAWEVVRAEIMRSFSLSTNLQESLRSKE

SEQ ID NO: 165 - protein, 165 aa, Artificial Sequence
  A75N/D77S Mutant INF-alpha 2b
CDLPQTHSLGSRRTLMLLAQMRRISLFSCLKDRHDFGFPQEEFGNQFQKAETIPVLHEMIQQIFNLFSTKDSSANWSETLLDKFYTELYQQLNDLEACVIQGVGVTETPLMKEDSILAVRKYFQRITLYLKEKKYSPCAWEVVRAEIMRSFSLSTNLQESLRSKE

SEQ ID NO: 166 - protein, 165 aa, Artificial Sequence
  I100N/G102S Mutant INF-alpha 2b
CDLPQTHSLGSRRTLMLLAQMRRISLFSCLKDRHDFGFPQEEFGNQFQKAETIPVLHEMIQQIFNLFSTKDSSAAWDETLLDKFYTELYQQLNDLEACVNQSVGVTETPLMKEDSILAVRKYFQRITLYLKEKKYSPCAWEVVRAEIMRSFSLSTNLQESLRSKE

SEQ ID NO: 167 - protein, 165 aa, Artificial Sequence
  I100N/G102T Mutant INF-alpha 2b
CDLPQTHSLGSRRTLMLLAQMRRISLFSCLKDRHDFGFPQEEFGNQFQKAETIPVLHEMIQQIFNLFSTKDSSAAWDETLLDKFYTELYQQLNDLEACVNQTVGVTETPLMKEDSILAVRKYFQRITLYLKEKKYSPCAWEVVRAEIMRSFSLSTNLQESLRSKE

SEQ ID NO: 168 - protein, 165 aa, Artificial Sequence
  V103N/V105S Mutant INF-alpha 2b
CDLPQTHSLGSRRTLMLLAQMRRISLFSCLKDRHDFGFPQEEFGNQFQKAETIPVLHEMIQQIFNLFSTKDSSAAWDETLLDKFYTELYQQLNDLEACVIQGNGSTETPLMKEDSILAVRKYFQRITLYLKEKKYSPCAWEVVRAEIMRSFSLSTNLQESLRSKE

SEQ ID NO: 169 - protein, 165 aa, Artificial Sequence
  V103N/V105T Mutant INF-alpha 2b
CDLPQTHSLGSRRTLMLLAQMRRISLFSCLKDRHDFGFPQEEFGNQFQKAETIPVLHEMIQQIFNLFSTKDSSAAWDETLLDKFYTELYQQLNDLEACVIQGNGTTETPLMKEDSILAVRKYFQRITLYLKEKKYSPCAWEVVRAEIMRSFSLSTNLQESLRSKE

SEQ ID NO: 170 - protein, 165 aa, Artificial Sequence
  G104N/T106T Mutant INF-alpha 2b
CDLPQTHSLGSRRTLMLLAQMRRISLFSCLKDRHDFGFPQEEFGNQFQKAETIPVLHEMIQQIFNLFSTKDSSAAWDETLLDKFYTELYQQLNDLEACVIQGVNVTETPLMKEDSILAVRKYFQRITLYLKEKKYSPCAWEVVRAEIMRSFSLSTNLQESLRSKE

SEQ ID NO: 171 - protein, 165 aa, Artificial Sequence
  V105N/E107S Mutant INF-alpha 2b
CDLPQTHSLGSRRTLMLLAQMRRISLFSCLKDRHDFGFPQEEFGNQFQKAETIPVLHEMIQQIFNLFSTKDSSAAWDETLLDKFYTELYQQLNDLEACVIQGVGNTSTPLMKEDSILAVRKYFQRITLYLKEKKYSPCAWEVVRAEIMRSFSLSTNLQESLRSKE

SEQ ID NO: 172 - protein, 165 aa, Artificial Sequence
  T106N/T108S Mutant INF-alpha 2b
CDLPQTHSLGSRRTLMLLAQMRRISLFSCLKDRHDFGFPQEEFGNQFQKAETIPVLHEMIQQIFNLFSTKDSSAAWDETLLDKFYTELYQQLNDLEACVIQGVGVNESPLMKEDSILAVRKYFQRITLYLKEKKYSPCAWEVVRAEIMRSFSLSTNLQESLRSKE

SEQ ID NO: 173 - protein, 165 aa, Artificial Sequence
  T106N/T108T Mutant INF-alpha 2b
CDLPQTHSLGSRRTLMLLAQMRRISLFSCLKDRHDFGFPQEEFGNQFQKAETIPVLHEMIQQIFNLFSTKDSSAAWDETLLDKFYTELYQQLNDLEACVIQGVGVNETPLMKEDSILAVRKYFQRITLYLKEKKYSPCAWEVVRAEIMRSFSLSTNLQESLRSKE

SEQ ID NO: 174 - protein, 165 aa, Artificial Sequence
  E107N/P109S Mutant INF-alpha 2b
CDLPQTHSLGSRRTLMLLAQMRRISLFSCLKDRHDFGFPQEEFGNQFQKAETIPVLHEMIQQIFNLFSTKDSSAAWDETLLDKFYTELYQQLNDLEACVIQGVGVTNTSLMKEDSILAVRKYFQRITLYLKEKKYSPCAWEVVRAEIMRSFSLSTNLQESLRSKE

SEQ ID NO: 175 - protein, 165 aa, Artificial Sequence
  E107N/P109T Mutant INF-alpha 2b
CDLPQTHSLGSRRTLMLLAQMRRISLFSCLKDRHDFGFPQEEFGNQFQKAETIPVLHEMIQQIFNLFSTKDSSAAWDETLLDKFYTELYQQLNDLEACVIQGVGVTNTTLMKEDSILAVRKYFQRITLYLKEKKYSPCAWEVVRAEIMRSFSLSTNLQESLRSKE

SEQ ID NO: 176 - protein, 165 aa, Artificial Sequence
  K134N/S136T Mutant INF-alpha 2b
CDLPQTHSLGSRRTLMLLAQMRRISLFSCLKDRHDFGFPQEEFGNQFQKAETIPVLHEMIQQIFNLFSTKDSSAAWDETLLDKFYTELYQQLNDLEACVIQGVGVTETPLMKEDSILAVRKYFQRITLYLKEKNYTPCAWEVVRAEIMRSFSLSTNLQESLRSKE

SEQ ID NO: 177 - protein, 165 aa, Artificial Sequence
  L157N/E159S Mutant INF-alpha 2b
CDLPQTHSLGSRRTLMLLAQMRRISLFSCLKDRHDFGFPQEEFGNQFQKAETIPVLHEMIQQIFNLFSTKDSSAAWDETLLDKFYTELYQQLNDLEACVIQGVGVTETPLMKEDSILAVRKYFQRITLYLKEKKYSPCAWEVVRAEIMRSFSLSTNNQSSLRSKE

SEQ ID NO: 178 - protein, 165 aa, Artificial Sequence
  L157N/E159T Mutant INF-alpha 2b
CDLPQTHSLGSRRTLMLLAQMRRISLFSCLKDRHDFGFPQEEFGNQFQKAETIPVLHEMIQQIFNLFSTKDSSAAWDETLLDKFYTELYQQLNDLEACVIQGVGVTETPLMKEDSILAVRKYFQRITLYLKEKKYSPCAWEVVRAEIMRSFSLSTNNQTSLRSKE

SEQ ID NO: 179 - protein, 165 aa, Artificial Sequence
  Q158N/S160T Mutant INF-alpha 2b
CDLPQTHSLGSRRTLMLLAQMRRISLFSCLKDRHDFGFPQEEFGNQFQKAETIPVLHEMIQQIFNLFSTKDSSAAWDETLLDKFYTELYQQLNDLEACVIQGVGVTETPLMKEDSILAVRKYFQRITLYLKEKKYSPCAWEVVRAEIMRSFSLSTNLNETLRSKE

SEQ ID NO: 180 - protein, 165 aa, Artificial Sequence
  E159N/L161S Mutant INF-alpha 2b
CDLPQTHSLGSRRTLMLLAQMRRISLFSCLKDRHDFGFPQEEFGNQFQKAETIPVLHEMIQQIFNLFSTKDSSAAWDETLLDKFYTELYQQLNDLEACVIQGVGVTETPLMKEDSILAVRKYFQRITLYLKEKKYSPCAWEVVRAEIMRSFSLSTNLQNSSRSKE

SEQ ID NO: 181 - protein, 165 aa, Artificial Sequence
  E159N/L161T Mutant INF-alpha 2b
CDLPQTHSLGSRRTLMLLAQMRRISLFSCLKDRHDFGFPQEEFGNQFQKAETIPVLHEMIQQIFNLFSTKDSSAAWDETLLDKFYTELYQQLNDLEACVIQGVGVTETPLMKEDSILAVRKYFQRITLYLKEKKYSPCAWEVVRAEIMRSFSLSTNLQNSTRSKE

SEQ ID NO: 182 - DNA, 55 bp, Artificial Sequence
  EcoRI Forward Primer
gcctgtatgatttattggatgttggaattccctgatgcggtattttctccttacg

SEQ ID NO: 183 - DNA, 55 bp, Artificial Sequence
  EcoRI Reverse Primer
cgtaaggagaaaataccgcatcagggaattccaacatccaataaatcatacaggc

SEQ ID NO: 184 - DNA, 35 bp, Artificial Sequence
  Seq ClaI Forward Primer
ctgattatcaaccgcggtacatatgattgacatgc

SEQ ID NO: 185 - DNA, 31 bp, Artificial Sequence
  Seq ClaI Reverse Primer
tacgggataataccgcgccacatagcagaac

SEQ ID NO: 186 - DNA, 18 bp, Artificial Sequence
  Seq Forward Primer
cctgatgaaggaggactc

SEQ ID NO: 187 - DNA, 18 bp, Artificial Sequence
  Seq Reverse Primer
ccaagcagcagatgagtc

SEQ ID NO: 188 - DNA, 31 bp, Artificial Sequence
  IFN alpha-2b 5' Primer
tcagctgcaagtcaagctgctctgtgggctg

SEQ ID NO: 189 - DNA, 48 bp, Artificial Sequence
  IFN alpha-2b 3' Primer
gctctagatcattccttacttcttaaactttcttgcaagtttgttgac

SEQ ID NO: 190 - DNA, 36 bp, Artificial Sequence
  IFN alpha-2b HindIII Primer
cccaagcttatggccttgacctttgctttactggtg

SEQ ID NO: 191 - DNA, 48 bp, Artificial Sequence; identical to SEQ ID NO: 189
  IFN alpha-2b XbaI Primer

SEQ ID NO: 192 - DNA, 80 bp, Artificial Sequence
  IFN alpha-2b 80 bp 5' Primer
cccaagcttatggccttgacctttgctttactggtggccctcctggtgctcagctgcaagtcaagctgctctgtgggctg

SEQ ID NO: 193 - DNA, 20 bp, Artificial Sequence
  EMCV Forward Primer
cccctacattgaggcatcca

SEQ ID NO: 194 - DNA, 21 bp, Artificial Sequence
  EMCV Reverse Primer
caggagcaggacaaggtcact

SEQ ID NO: 195 - DNA, 22 bp, Artificial Sequence
  misc_feature 1; 22: EMCV Probe: n at position 1 is a 5-carboxyfluorescein (FAM)-modified deoxycytidylate; n at position 22 is an N,N,N',N'- tetramethyl-6-carboxyrhodamine (TAMRA)-modified deoxythymidylate.
nagccgtcaagacccaaccgcn

SEQ ID NO: 196 - protein, 165 aa, Homo sapiens
CDLPQTHSLGSRRTLMLLAQMRRISLFSCLKDRHDFGFPQEEFGNQFQKAETIPVLHEMIQQIFNLFSTKDSSAAWDETLLDKFYTELHQQLNDLEACVIQGVGVTETPLMKEDSILAVRKYFQRITLYLKEKKYSPCAWEVVRAEIMRSFSLSTNLQESLRSKE

SEQ ID NO: 197 - protein, 165 aa, Homo sapiens
CDLPQTHSLGSRRTLMLLAQMRRISLFSCLKDRHDFGFPQEEFGNQFQKAETIPVLHEMIQQIFNLFSTKDSSAAWDETLLDKFYTELYQQLNDLEACVIQGVGVTETPLVKEDSILAVRKYFQRITLYLKEKKYSPCAWEVVRAEIMRSFSLSTNLQESLRSKE

SEQ ID NO: 198 - protein, 165 aa, Homo sapiens
CDLPQTHSLGSRRTLMLLAQMRRISLFSCLKDRHDFGFPQHEFGDQFQKAETIPVLHEMIQQIFNLFSTKDSSAAWDETLLDKFYTELHQQLNDLEACVIQGVGVTETPLMKEDSILAVRKYFQRITLYLKEKKYSPCAWEVVRAEIMRSFSLSTNLQESLRSKE

SEQ ID NO: 199 - protein, 165 aa, Homo sapiens
CDLPQTHSLGSRRTLMLLAQMRRISLFSCLKDRHDFGFPQQEFGNQFQKAETIPVLHEMIQQIFNLFSTKDSSAAWDETLLDKFYTELYQQLNGLEACVIQGVGVTETPLMKEDSILAVRKYFQRITLYLKEKKYSPCAWEVVRAEIMRSFSLSTNLQESLRSKE

SEQ ID NO: 200 - protein, 165 aa, Homo sapiens
CDLPQTHSLGSRRTLMLLAQMRRISLVSCLKDRHDFGFPQEEFGNQFQKAETIPVLHQMIQQIFNLFSTKDSSAAWDETLLDKFYTELYQQLNDLEACVIQGVGVTETPLMKEDSILAVRKYFQRITLYLKEKKYSPCAWEVVRAEIMRSFSLSTNLQESLRSKE

SEQ ID NO: 201 - protein, 165 aa, Homo sapiens
CDLPQTHSLGSRRTLMLLAQMRRISLFSCLKDHHDFGFPQEEFGNQFQKAETIPVLHHMIQQIFNLFSTKDSSAAWDHTLLDKFYTELYQQLNDLEACVIQGVGVTETPVMKEDSILAVRKYFQRITLYLKEKKYSPCAWEVVRAEIMRSFSLSTNLQESLRSKE

SEQ ID NO: 202 - protein, 165 aa, Homo sapiens
CDLPQTHSLGSRRTLMLLAQMRRISLFSCLKDRHDFGFPQEEFGNQFQKAETIPVLHEMIQQIFNLFSTKDSSAAWDETLLDKFYTELYQQLNDLEACVIQGVGVTETALMKEDSILAVRQYFQRITLYLKEKKYSPCAWEVVRAEIMRSFSLSTNLQESLRSKE

SEQ ID NO: 203 - protein, 165 aa, Homo sapiens
CDLPQTHSLGSRRTLMLLAQMRRISLFSCLKDRHDFGFPQEEFGNQFQKAETIPVLHEMIQQIFNLFSTKDSSAAWDETLLDKFYTELYQQLNDLEACVIQRVGVTETALMKEDSILAVRQYFQRITLYLKEQKYSPCAWEVVRAEIMRSFSLSTNLQESLRSKE

SEQ ID NO: 204 - protein, 165 aa, Homo sapiens
CDLPQTHSLGSRRTLMLLAQMRRISLFSCLKDRHDFGFPQEEFGNQFQKAETIPVLHEMIQQIFNLFSTKDSSAAWDETLLDKFYTELYQQLNDLEACVIQGVGVTETPLMKEDSIVAVRKYFQRITLYLKEKKYSPCGWEVVRAEIMRSFSLSTNLQESLRSKE

SEQ ID NO: 205 - protein, 165 aa, Homo sapiens
CDLPQTHSLGSRRTLMLLAQMRRISLFSCLKDRHDFGFPQEEFGNQFQKAETIPVLHEMIQQIFNLFSTKDSSAAWDETLLDKFYTELYQQLNDLEACVIQGVGVTETPLVKEDSILAVRKYFQHITLYLKEKKYSPCAWEVVRAEIMRSFSLSTNLQESLRSKE

SEQ ID NO: 206 - protein, 165 aa, Homo sapiens
CDLPQTHSLGSRRTLMLLAQMRRISLFSCLKDRHDFGFPQEEFGNQFQKAETIPVLHEMIQQIFNLFSTKDSSAAWDETLLDKFYTELHQQLNDLEACVIQGVGVTETPLMKEDSILAVRKYFQRITLYLKEKKYSPCAWEVVRAEIMRSFSLSTNLQHSLRSKE

SEQ ID NO: 207 - protein, 165 aa, Homo sapiens
CDLPQTHSLGSRRTLMLLAQMRRISLFSCLKDRHDFGFPQEEFGNQFQKAETIPVLHEMIQQIFNLFSTKDSSAAWDETLLDKFYTELYQQLNDLEACVIAGVGVTETPLMKEDSILAVRKYFQRITLYLKEKKYSPCAWEVVRAEIMRSFSLSTNLQESLRSKE

SEQ ID NO: 208 - DNA, 41 bp, Artificial Sequence
  Oligonucleotide
aacatatgtgtgatctgcctcaaacccacagcctgggtagc

SEQ ID NO: 209 - DNA, 46 bp, Artificial Sequence
  Oligonucleotide
aaggatcctcattccttacttcttaaactttcttgcaagtttgttg

SEQ ID NO: 210 - DNA, 41 bp, Artificial Sequence; identical to SEQ ID NO: 208
  Oligonucleotide

SEQ ID NO: 211 - DNA, 46 bp, Artificial Sequence; identical to SEQ ID NO: 209
  Oligonucleotide

SEQ ID NO: 212 - protein, 166 aa, Homo sapiens
VSYNLLGFLQRSSNFQCQKLLWQLNGRLEYCLKDRMNFDIPEEIKQLQQFQKEDAALTIYEMLQNIFAIFRQDSSSTGWNETIVENLLANVYHQINHLKTVLEEKLEKEDFTRGKLMSSLHLKRYYGRILHYLKAKEYSHCAWTIVRVEILRNFYFINRLTGYLRN

SEQ ID NO: 213 - protein, 166 aa, Homo sapiens
ISYNLLGFLQRSSNFQCQKLLWQLNGRLEYCLKDRMNFDIPEEIKQLQQFQKEDAALTIYEMLQNIFAIFRQDSSSTGWNETIVENLLANVYHQINHLKTVLEEKLEKEDFTRGKLMSSLHLKRYYGRILHYLKAKEYSHCAWTIVRVEILRNFYFINRLTGYLRN

SEQ ID NO: 214 - protein, 166 aa, Homo sapiens
TSYNLLGFLQRSSNFQCQKLLWQLNGRLEYCLKDRMNFDIPEEIKQLQQFQKEDAALTIYEMLQNIFAIFRQDSSSTGWNETIVENLLANVYHQINHLKTVLEEKLEKEDFTRGKLMSSLHLKRYYGRILHYLKAKEYSHCAWTIVRVEILRNFYFINRLTGYLRN

SEQ ID NO: 215 - protein, 166 aa, Homo sapiens
ASYNLLGFLQRSSNFQCQKLLWQLNGRLEYCLKDRMNFDIPEEIKQLQQFQKEDAALTIYEMLQNIFAIFRQDSSSTGWNETIVENLLANVYHQINHLKTVLEEKLEKEDFTRGKLMSSLHLKRYYGRILHYLKAKEYSHCAWTIVRVEILRNFYFINRLTGYLRN

SEQ ID NO: 216 - protein, 166 aa, Homo sapiens
MSYNVLGFLQRSSNFQCQKLLWQLNGRLEYCLKDRMNFDIPEEIKQLQQFQKEDAALTIYEMLQNIFAIFRQDSSSTGWNETIVENLLANVYHQINHLKTVLEEKLEKEDFTRGKLMSSLHLKRYYGRILHYLKAKEYSHCAWTIVRVEILRNFYFINRLTGYLRN

SEQ ID NO: 217 - protein, 166 aa, Homo sapiens
MSYNILGFLQRSSNFQCQKLLWQLNGRLEYCLKDRMNFDIPEEIKQLQQFQKEDAALTIYEMLQNIFAIFRQDSSSTGWNETIVENLLANVYHQINHLKTVLEEKLEKEDFTRGKLMSSLHLKRYYGRILHYLKAKEYSHCAWTIVRVEILRNFYFINRLTGYLRN

SEQ ID NO: 218 - protein, 166 aa, Homo sapiens
MSYNTLGFLQRSSNFQCQKLLWQLNGRLEYCLKDRMNFDIPEEIKQLQQFQKEDAALTIYEMLQNIFAIFRQDSSSTGWNETIVENLLANVYHQINHLKTVLEEKLEKEDFTRGKLMSSLHLKRYYGRILHYLKAKEYSHCAWTIVRVEILRNFYFINRLTGYLRN

SEQ ID NO: 219 - protein, 166 aa, Homo sapiens
MSYNQLGFLQRSSNFQCQKLLWQLNGRLEYCLKDRMNFDIPEEIKQLQQFQKEDAALTIYEMLQNIFAIFRQDSSSTGWNETIVENLLANVYHQINHLKTVLEEKLEKEDFTRGKLMSSLHLKRYYGRILHYLKAKEYSHCAWTIVRVEILRNFYFINRLTGYLRN

SEQ ID NO: 220 - protein, 166 aa, Homo sapiens
MSYNHLGFLQRSSNFQCQKLLWQLNGRLEYCLKDRMNFDIPEEIKQLQQFQKEDAALTIYEMLQNIFAIFRQDSSSTGWNETIVENLLANVYHQINHLKTVLEEKLEKEDFTRGKLMSSLHLKRYYGRILHYLKAKEYSHCAWTIVRVEILRNFYFINRLTGYLRN

SEQ ID NO: 221 - protein, 166 aa, Homo sapiens
MSYNALGFLQRSSNFQCQKLLWQLNGRLEYCLKDRMNFDIPEEIKQLQQFQKEDAALTIYEMLQNIFAIFRQDSSSTGWNETIVENLLANVYHQINHLKTVLEEKLEKEDFTRGKLMSSLHLKRYYGRILHYLKAKEYSHCAWTIVRVEILRNFYFINRLTGYLRN

SEQ ID NO: 222 - protein, 166 aa, Homo sapiens
MSYNLLGILQRSSNFQCQKLLWQLNGRLEYCLKDRMNFDIPEEIKQLQQFQKEDAALTIYEMLQNIFAIFRQDSSSTGWNETIVENLLANVYHQINHLKTVLEEKLEKEDFTRGKLMSSLHLKRYYGRILHYLKAKEYSHCAWTIVRVEILRNFYFINRLTGYLRN

SEQ ID NO: 223 - protein, 166 aa, Homo sapiens
MSYNLLGVLQRSSNFQCQKLLWQLNGRLEYCLKDRMNFDIPEEIKQLQQFQKEDAALTIYEMLQNIFAIFRQDSSSTGWNETIVENLLANVYHQINHLKTVLEEKLEKEDFTRGKLMSSLHLKRYYGRILHYLKAKEYSHCAWTIVRVEILRNFYFINRLTGYLRN

SEQ ID NO: 224 - protein, 166 aa, Homo sapiens
MSYNLLGFVQRSSNFQCQKLLWQLNGRLEYCLKDRMNFDIPEEIKQLQQFQKEDAALTIYEMLQNIFAIFRQDSSSTGWNETIVENLLANVYHQINHLKTVLEEKLEKEDFTRGKLMSSLHLKRYYGRILHYLKAKEYSHCAWTIVRVEILRNFYFINRLTGYLRN

SEQ ID NO: 225 - protein, 166 aa, Homo sapiens
MSYNLLGFIQRSSNFQCQKLLWQLNGRLEYCLKDRMNFDIPEEIKQLQQFQKEDAALTIYEMLQNIFAIFRQDSSSTGWNETIVENLLANVYHQINHLKTVLEEKLEKEDFTRGKLMSSLHLKRYYGRILHYLKAKEYSHCAWTIVRVEILRNFYFINRLTGYLRN

SEQ ID NO: 226 - protein, 166 aa, Homo sapiens
MSYNLLGFTQRSSNFQCQKLLWQLNGRLEYCLKDRMNFDIPEEIKQLQQFQKEDAALTIYEMLQNIFAIFRQDSSSTGWNETIVENLLANVYHQINHLKTVLEEKLEKEDFTRGKLMSSLHLKRYYGRILHYLKAKEYSHCAWTIVRVEILRNFYFINRLTGYLRN

SEQ ID NO: 227 - protein, 166 aa, Homo sapiens
MSYNLLGFQQRSSNFQCQKLLWQLNGRLEYCLKDRMNFDIPEEIKQLQQFQKEDAALTIYEMLQNIFAIFRQDSSSTGWNETIVENLLANVYHQINHLKTVLEEKLEKEDFTRGKLMSSLHLKRYYGRILHYLKAKEYSHCAWTIVRVEILRNFYFINRLTGYLRN

SEQ ID NO: 228 - protein, 166 aa, Homo sapiens
MSYNLLGFHQRSSNFQCQKLLWQLNGRLEYCLKDRMNFDIPEEIKQLQQFQKEDAALTIYEMLQNIFAIFRQDSSSTGWNETIVENLLANVYHQINHLKTVLEEKLEKEDFTRGKLMSSLHLKRYYGRILHYLKAKEYSHCAWTIVRVEILRNFYFINRLTGYLRN

SEQ ID NO: 229 - protein, 166 aa, Homo sapiens
MSYNLLGFAQRSSNFQCQKLLWQLNGRLEYCLKDRMNFDIPEEIKQLQQFQKEDAALTIYEMLQNIFAIFRQDSSSTGWNETIVENLLANVYHQINHLKTVLEEKLEKEDFTRGKLMSSLHLKRYYGRILHYLKAKEYSHCAWTIVRVEILRNFYFINRLTGYLRN

SEQ ID NO: 230 - protein, 166 aa, Homo sapiens
MSYNLLGFLQHSSNFQCQKLLWQLNGRLEYCLKDRMNFDIPEEIKQLQQFQKEDAALTIYEMLQNIFAIFRQDSSSTGWNETIVENLLANVYHQINHLKTVLEEKLEKEDFTRGKLMSSLHLKRYYGRILHYLKAKEYSHCAWTIVRVEILRNFYFINRLTGYLRN

SEQ ID NO: 231 - protein, 166 aa, Homo sapiens
MSYNLLGFLQQSSNFQCQKLLWQLNGRLEYCLKDRMNFDIPEEIKQLQQFQKEDAALTIYEMLQNIFAIFRQDSSSTGWNETIVENLLANVYHQINHLKTVLEEKLEKEDFTRGKLMSSLHLKRYYGRILHYLKAKEYSHCAWTIVRVEILRNFYFINRLTGYLRN

SEQ ID NO: 232 - protein, 166 aa, Homo sapiens
MSYNLLGFLQRSSNIQCQKLLWQLNGRLEYCLKDRMNFDIPEEIKQLQQFQKEDAALTIYEMLQNIFAIFRQDSSSTGWNETIVENLLANVYHQINHLKTVLEEKLEKEDFTRGKLMSSLHLKRYYGRILHYLKAKEYSHCAWTIVRVEILRNFYFINRLTGYLRN

SEQ ID NO: 233 - protein, 166 aa, Homo sapiens
MSYNLLGFLQRSSNVQCQKLLWQLNGRLEYCLKDRMNFDIPEEIKQLQQFQKEDAALTIYEMLQNIFAIFRQDSSSTGWNETIVENLLANVYHQINHLKTVLEEKLEKEDFTRGKLMSSLHLKRYYGRILHYLKAKEYSHCAWTIVRVEILRNFYFINRLTGYLRN

SEQ ID NO: 234 - protein, 166 aa, Homo sapiens
MSYNLLGFLQRSSNFQCQQLLWQLNGRLEYCLKDRMNFDIPEEIKQLQQFQKEDAALTIYEMLQNIFAIFRQDSSSTGWNETIVENLLANVYHQINHLKTVLEEKLEKEDFTRGKLMSSLHLKRYYGRILHYLKAKEYSHCAWTIVRVEILRNFYFINRLTGYLRN

SEQ ID NO: 235 - protein, 166 aa, Homo sapiens
MSYNLLGFLQRSSNFQCQTLLWQLNGRLEYCLKDRMNFDIPEEIKQLQQFQKEDAALTIYEMLQNIFAIFRQDSSSTGWNETIVENLLANVYHQINHLKTVLEEKLEKEDFTRGKLMSSLHLKRYYGRILHYLKAKEYSHCAWTIVRVEILRNFYFINRLTGYLRN

SEQ ID NO: 236 - protein, 166 aa, Homo sapiens
MSYNLLGFLQRSSNFQCQSLLWQLNGRLEYCLKDRMNFDIPEEIKQLQQFQKEDAALTIYEMLQNIFAIFRQDSSSTGWNETIVENLLANVYHQINHLKTVLEEKLEKEDFTRGKLMSSLHLKRYYGRILHYLKAKEYSHCAWTIVRVEILRNFYFINRLTGYLRN

SEQ ID NO: 237 - protein, 166 aa, Homo sapiens
MSYNLLGFLQRSSNFQCQHLLWQLNGRLEYCLKDRMNFDIPEEIKQLQQFQKEDAALTIYEMLQNIFAIFRQDSSSTGWNETIVENLLANVYHQINHLKTVLEEKLEKEDFTRGKLMSSLHLKRYYGRILHYLKAKEYSHCAWTIVRVEILRNFYFINRLTGYLRN

SEQ ID NO: 238 - protein, 166 aa, Homo sapiens
MSYNLLGFLQRSSNFQCQKLLSQLNGRLEYCLKDRMNFDIPEEIKQLQQFQKEDAALTIYEMLQNIFAIFRQDSSSTGWNETIVENLLANVYHQINHLKTVLEEKLEKEDFTRGKLMSSLHLKRYYGRILHYLKAKEYSHCAWTIVRVEILRNFYFINRLTGYLRN

SEQ ID NO: 239 - protein, 165 aa, Homo sapiens
MSYNLLGFLQRSSNFQCQKLLHQLNGRLEYCLKDRMNFDIPEEIKQLQQFQKEDAALTIYEMLQNIFAIFRQDSSSTGWNETIVENLLANVYHQINHLKTVLEEKLEKEDFTRGKLMSSLHLKRYYGRILHYLKAKEYSHCAWTIVRVEILRNFYFINRLTGYLR

SEQ ID NO: 240 - protein, 166 aa, Homo sapiens
MSYNLLGFLQRSSNFQCQKLLWQLHGRLEYCLKDRMNFDIPEEIKQLQQFQKEDAALTIYEMLQNIFAIFRQDSSSTGWNETIVENLLANVYHQINHLKTVLEEKLEKEDFTRGKLMSSLHLKRYYGRILHYLKAKEYSHCAWTIVRVEILRNFYFINRLTGYLRN

SEQ ID NO: 241 - protein, 166 aa, Homo sapiens
MSYNLLGFLQRSSNFQCQKLLWQLSGRLEYCLKDRMNFDIPEEIKQLQQFQKEDAALTIYEMLQNIFAIFRQDSSSTGWNETIVENLLANVYHQINHLKTVLEEKLEKEDFTRGKLMSSLHLKRYYGRILHYLKAKEYSHCAWTIVRVEILRNFYFINRLTGYLRN

SEQ ID NO: 242 - protein, 166 aa, Homo sapiens
MSYNLLGFLQRSSNFQCQKLLWQLQGRLEYCLKDRMNFDIPEEIKQLQQFQKEDAALTIYEMLQNIFAIFRQDSSSTGWNETIVENLLANVYHQINHLKTVLEEKLEKEDFTRGKLMSSLHLKRYYGRILHYLKAKEYSHCAWTIVRVEILRNFYFINRLTGYLRN

SEQ ID NO: 243 - protein, 166 aa, Homo sapiens
MSYNLLGFLQRSSNFQCQKLLWQLNGHLEYCLKDRMNFDIPEEIKQLQQFQKEDAALTIYEMLQNIFAIFRQDSSSTGWNETIVENLLANVYHQINHLKTVLEEKLEKEDFTRGKLMSSLHLKRYYGRILHYLKAKEYSHCAWTIVRVEILRNFYFINRLTGYLRN

SEQ ID NO: 244 - protein, 166 aa, Homo sapiens
MSYNLLGFLQRSSNFQCQKLLWQLNGQLEYCLKDRMNFDIPEEIKQLQQFQKEDAALTIYEMLQNIFAIFRQDSSSTGWNETIVENLLANVYHQINHLKTVLEEKLEKEDFTRGKLMSSLHLKRYYGRILHYLKAKEYSHCAWTIVRVEILRNFYFINRLTGYLRN

SEQ ID NO: 245 - protein, 166 aa, Homo sapiens
MSYNLLGFLQRSSNFQCQKLLWQLNGRVEYCLKDRMNFDIPEEIKQLQQFQKEDAALTIYEMLQNIFAIFRQDSSSTGWNETIVENLLANVYHQINHLKTVLEEKLEKEDFTRGKLMSSLHLKRYYGRILHYLKAKEYSHCAWTIVRVEILRNFYFINRLTGYLRN

SEQ ID NO: 246 - protein, 166 aa, Homo sapiens
MSYNLLGFLQRSSNFQCQKLLWQLNGRIEYCLKDRMNFDIPEEIKQLQQFQKEDAALTIYEMLQNIFAIFRQDSSSTGWNETIVENLLANVYHQINHLKTVLEEKLEKEDFTRGKLMSSLHLKRYYGRILHYLKAKEYSHCAWTIVRVEILRNFYFINRLTGYLRN

SEQ ID NO: 247 - protein, 166 aa, Homo sapiens
MSYNLLGFLQRSSNFQCQKLLWQLNGRTEYCLKDRMNFDIPEEIKQLQQFQKEDAALTIYEMLQNIFAIFRQDSSSTGWNETIVENLLANVYHQINHLKTVLEEKLEKEDFTRGKLMSSLHLKRYYGRILHYLKAKEYSHCAWTIVRVEILRNFYFINRLTGYLRN

SEQ ID NO: 248 - protein, 166 aa, Homo sapiens
MSYNLLGFLQRSSNFQCQKLLWQLNGRQEYCLKDRMNFDIPEEIKQLQQFQKEDAALTIYEMLQNIFAIFRQDSSSTGWNETIVENLLANVYHQINHLKTVLEEKLEKEDFTRGKLMSSLHLKRYYGRILHYLKAKEYSHCAWTIVRVEILRNFYFINRLTGYLRN

SEQ ID NO: 249 - protein, 166 aa, Homo sapiens
MSYNLLGFLQRSSNFQCQKLLWQLNGRHEYCLKDRMNFDIPEEIKQLQQFQKEDAALTIYEMLQNIFAIFRQDSSSTGWNETIVENLLANVYHQINHLKTVLEEKLEKEDFTRGKLMSSLHLKRYYGRILHYLKAKEYSHCAWTIVRVEILRNFYFINRLTGYLRN

SEQ ID NO: 250 - protein, 166 aa, Homo sapiens
MSYNLLGFLQRSSNFQCQKLLWQLNGRAEYCLKDRMNFDIPEEIKQLQQFQKEDAALTIYEMLQNIFAIFRQDSSSTGWNETIVENLLANVYHQINHLKTVLEEKLEKEDFTRGKLMSSLHLKRYYGRILHYLKAKEYSHCAWTIVRVEILRNFYFINRLTGYLRN

SEQ ID NO: 251 - protein, 166 aa, Homo sapiens
MSYNLLGFLQRSSNFQCQKLLWQLNGRLQYCLKDRMNFDIPEEIKQLQQFQKEDAALTIYEMLQNIFAIFRQDSSSTGWNETIVENLLANVYHQINHLKTVLEEKLEKEDFTRGKLMSSLHLKRYYGRILHYLKAKEYSHCAWTIVRVEILRNFYFINRLTGYLRN

SEQ ID NO: 252 - protein, 166 aa, Homo sapiens
MSYNLLGFLQRSSNFQCQKLLWQLNGRLHYCLKDRMNFDIPEEIKQLQQFQKEDAALTIYEMLQNIFAIFRQDSSSTGWNETIVENLLANVYHQINHLKTVLEEKLEKEDFTRGKLMSSLHLKRYYGRILHYLKAKEYSHCAWTIVRVEILRNFYFINRLTGYLRN

SEQ ID NO: 253 - protein, 166 aa, Homo sapiens
MSYNLLGFLQRSSNFQCQKLLWQLNGRLEHCLKDRMNFDIPEEIKQLQQFQKEDAALTIYEMLQNIFAIFRQDSSSTGWNETIVENLLANVYHQINHLKTVLEEKLEKEDFTRGKLMSSLHLKRYYGRILHYLKAKEYSHCAWTIVRVEILRNFYFINRLTGYLRN

SEQ ID NO: 254 - protein, 166 aa, Homo sapiens
MSYNLLGFLQRSSNFQCQKLLWQLNGRLEICLKDRMNFDIPEEIKQLQQFQKEDAALTIYEMLQNIFAIFRQDSSSTGWNETIVENLLANVYHQINHLKTVLEEKLEKEDFTRGKLMSSLHLKRYYGRILHYLKAKEYSHCAWTIVRVEILRNFYFINRLTGYLRN

SEQ ID NO: 255 - protein, 166 aa, Homo sapiens
MSYNLLGFLQRSSNFQCQKLLWQLNGRLEYCVKDRMNFDIPEEIKQLQQFQKEDAALTIYEMLQNIFAIFRQDSSSTGWNETIVENLLANVYHQINHLKTVLEEKLEKEDFTRGKLMSSLHLKRYYGRILHYLKAKEYSHCAWTIVRVEILRNFYFINRLTGYLRN

SEQ ID NO: 256 - protein, 166 aa, Homo sapiens
MSYNLLGFLQRSSNFQCQKLLWQLNGRLEYCIKDRMNFDIPEEIKQLQQFQKEDAALTIYEMLQNIFAIFRQDSSSTGWNETIVENLLANVYHQINHLKTVLEEKLEKEDFTRGKLMSSLHLKRYYGRILHYLKAKEYSHCAWTIVRVEILRNFYFINRLTGYLRN

SEQ ID NO: 257 - protein, 166 aa, Homo sapiens
MSYNLLGFLQRSSNFQCQKLLWQLNGRLEYCTKDRMNFDIPEEIKQLQQFQKEDAALTIYEMLQNIFAIFRQDSSSTGWNETIVENLLANVYHQINHLKTVLEEKLEKEDFTRGKLMSSLHLKRYYGRILHYLKAKEYSHCAWTIVRVEILRNFYFINRLTGYLRN

SEQ ID NO: 258 - protein, 166 aa, Homo sapiens
MSYNLLGFLQRSSNFQCQKLLWQLNGRLEYCQKDRMNFDIPEEIKQLQQFQKEDAALTIYEMLQNIFAIFRQDSSSTGWNETIVENLLANVYHQINHLKTVLEEKLEKEDFTRGKLMSSLHLKRYYGRILHYLKAKEYSHCAWTIVRVEILRNFYFINRLTGYLRN

SEQ ID NO: 259 - protein, 166 aa, Homo sapiens
MSYNLLGFLQRSSNFQCQKLLWQLNGRLEYCHKDRMNFDIPEEIKQLQQFQKEDAALTIYEMLQNIFAIFRQDSSSTGWNETIVENLLANVYHQINHLKTVLEEKLEKEDFTRGKLMSSLHLKRYYGRILHYLKAKEYSHCAWTIVRVEILRNFYFINRLTGYLRN

SEQ ID NO: 260 - protein, 166 aa, Homo sapiens
MSYNLLGFLQRSSNFQCQKLLWQLNGRLEYCAKDRMNFDIPEEIKQLQQFQKEDAALTIYEMLQNIFAIFRQDSSSTGWNETIVENLLANVYHQINHLKTVLEEKLEKEDFTRGKLMSSLHLKRYYGRILHYLKAKEYSHCAWTIVRVEILRNFYFINRLTGYLRN

SEQ ID NO: 261 - protein, 166 aa, Homo sapiens
QSYNLLGFLQRSSNFQCQKLLWQLNGRLEYCLKDRMNFDIPEEIKQLQQFQKEDAALTIYEMLQNIFAIFRQDSSSTGWNETIVENLLANVYHQINHLKTVLEEKLEKEDFTRGKLMSSLHLKRYYGRILHYLKAKEYSHCAWTIVRVEILRNFYFINRLTGYLRN

SEQ ID NO: 262 - protein, 166 aa, Homo sapiens
MSYNLLGFLQRSSNFQCQKLLWQLNGRLEYCLQDRMNFDIPEEIKQLQQFQKEDAALTIYEMLQNIFAIFRQDSSSTGWNETIVENLLANVYHQINHLKTVLEEKLEKEDFTRGKLMSSLHLKRYYGRILHYLKAKEYSHCAWTIVRVEILRNFYFINRLTGYLRN

SEQ ID NO: 263 - protein, 166 aa, Homo sapiens
MSYNLLGFLQRSSNFQCQKLLWQLNGRLEYCLTDRMNFDIPEEIKQLQQFQKEDAALTIYEMLQNIFAIFRQDSSSTGWNETIVENLLANVYHQINHLKTVLEEKLEKEDFTRGKLMSSLHLKRYYGRILHYLKAKEYSHCAWTIVRVEILRNFYFINRLTGYLRN

SEQ ID NO: 264 - protein, 166 aa, Homo sapiens
MSYNLLGFLQRSSNFQCQKLLWQLNGRLEYCLSDRMNFDIPEEIKQLQQFQKEDAALTIYEMLQNIFAIFRQDSSSTGWNETIVENLLANVYHQINHLKTVLEEKLEKEDFTRGKLMSSLHLKRYYGRILHYLKAKEYSHCAWTIVRVEILRNFYFINRLTGYLRN

SEQ ID NO: 265 - protein, 166 aa, Homo sapiens
MSYNLLGFLQRSSNFQCQKLLWQLNGRLEYCLHDRMNFDIPEEIKQLQQFQKEDAALTIYEMLQNIFAIFRQDSSSTGWNETIVENLLANVYHQINHLKTVLEEKLEKEDFTRGKLMSSLHLKRYYGRILHYLKAKEYSHCAWTIVRVEILRNFYFINRLTGYLRN

SEQ ID NO: 266 - protein, 166 aa, Homo sapiens
MSYNLLGFLQRSSNFQCQKLLWQLNGRLEYCLKDHMNFDIPEEIKQLQQFQKEDAALTIYEMLQNIFAIFRQDSSSTGWNETIVENLLANVYHQINHLKTVLEEKLEKEDFTRGKLMSSLHLKRYYGRILHYLKAKEYSHCAWTIVRVEILRNFYFINRLTGYLRN

SEQ ID NO: 267 - protein, 166 aa, Homo sapiens
MSYNLLGFLQRSSNFQCQKLLWQLNGRLEYCLKDQMNFDIPEEIKQLQQFQKEDAALTIYEMLQNIFAIFRQDSSSTGWNETIVENLLANVYHQINHLKTVLEEKLEKEDFTRGKLMSSLHLKRYYGRILHYLKAKEYSHCAWTIVRVEILRNFYFINRLTGYLRN

SEQ ID NO: 268 - protein, 166 aa, Homo sapiens
MSYNLLGFLQRSSNFQCQKLLWQLNGRLEYCLKDRVNFDIPEEIKQLQQFQKEDAALTIYEMLQNIFAIFRQDSSSTGWNETIVENLLANVYHQINHLKTVLEEKLEKEDFTRGKLMSSLHLKRYYGRILHYLKAKEYSHCAWTIVRVEILRNFYFINRLTGYLRN

SEQ ID NO: 269 - protein, 166 aa, Homo sapiens
MSYNLLGFLQRSSNFQCQKLLWQLNGRLEYCLKDRINFDIPEEIKQLQQFQKEDAALTIYEMLQNIFAIFRQDSSSTGWNETIVENLLANVYHQINHLKTVLEEKLEKEDFTRGKLMSSLHLKRYYGRILHYLKAKEYSHCAWTIVRVEILRNFYFINRLTGYLRN

SEQ ID NO: 270 - protein, 166 aa, Homo sapiens
MSYNLLGFLQRSSNFQCQKLLWQLNGRLEYCLKDRTNFDIPEEIKQLQQFQKEDAALTIYEMLQNIFAIFRQDSSSTGWNETIVENLLANVYHQINHLKTVLEEKLEKEDFTRGKLMSSLHLKRYYGRILHYLKAKEYSHCAWTIVRVEILRNFYFINRLTGYLRN

SEQ ID NO: 271 - protein, 166 aa, Homo sapiens
MSYNLLGFLQRSSNFQCQKLLWQLNGRLEYCLKDRQNFDIPEEIKQLQQFQKEDAALTIYEMLQNIFAIFRQDSSSTGWNETIVENLLANVYHQINHLKTVLEEKLEKEDFTRGKLMSSLHLKRYYGRILHYLKAKEYSHCAWTIVRVEILRNFYFINRLTGYLRN

SEQ ID NO: 272 - protein, 166 aa, Homo sapiens
MSYNLLGFLQRSSNFQCQKLLWQLNGRLEYCLKDRANFDIPEEIKQLQQFQKEDAALTIYEMLQNIFAIFRQDSSSTGWNETIVENLLANVYHQINHLKTVLEEKLEKEDFTRGKLMSSLHLKRYYGRILHYLKAKEYSHCAWTIVRVEILRNFYFINRLTGYLRN

SEQ ID NO: 273 - protein, 166 aa, Homo sapiens
MSYNLLGFLQRSSNFQCQKLLWQLNGRLEYCLKDRMNFDIPEEIKQLQQFQKEDAALTIYEMLQNIFAIFRQDSSSTGWNETIVQNLLANVYHQINHLKTVLEEKLEKEDFTRGKLMSSLHLKRYYGRILHYLKAKEYSHCAWTIVRVEILRNFYFINRLTGYLRN

SEQ ID NO: 274 - protein, 166 aa, Homo sapiens
MSYNLLGFLQRSSNFQCQKLLWQLNGRLEYCLKDRMNFDIPEEIKQLQQFQKEDAALTIYEMLQNIFAIFRQDSSSTGWNETIVHNLLANVYHQINHLKTVLEEKLEKEDFTRGKLMSSLHLKRYYGRILHYLKAKEYSHCAWTIVRVEILRNFYFINRLTGYLRN

SEQ ID NO: 275 - protein, 166 aa, Homo sapiens
MSYNLLGFLQRSSNFQCQKLLWQLNGRLEYCLKDRMNFDIPEEIKQLQQFQKEDAALTIYEMLQNIFAIFRQDSSSTGWNETIVENLLANVHHQINHLKTVLEEKLEKEDFTRGKLMSSLHLKRYYGRILHYLKAKEYSHCAWTIVRVEILRNFYFINRLTGYLRN

SEQ ID NO: 276 - protein, 166 aa, Homo sapiens
MSYNLLGFLQRSSNFQCQKLLWQLNGRLEYCLKDRMNFDIPEEIKQLQQFQKEDAALTIYEMLQNIFAIFRQDSSSTGWNETIVENLLANVIHQINHLKTVLEEKLEKEDFTRGKLMSSLHLKRYYGRILHYLKAKEYSHCAWTIVRVEILRNFYFINRLTGYLRN

SEQ ID NO: 277 - protein, 166 aa, Homo sapiens
MSYNLLGFLQRSSNFQCQKLLWQLNGRLEYCLKDRMNFDIPEEIKQLQQFQKEDAALTIYEMLQNIFAIFRQDSSSTGWNETIVENLLANVYHQINHLQTVLEEKLEKEDFTRGKLMSSLHLKRYYGRILHYLKAKEYSHCAWTIVRVEILRNFYFINRLTGYLRN

SEQ ID NO: 278 - protein, 166 aa, Homo sapiens
MSYNLLGFLQRSSNFQCQKLLWQLNGRLEYCLKDRMNFDIPEEIKQLQQFQKEDAALTIYEMLQNIFAIFRQDSSSTGWNETIVENLLANVYHQINHLTTVLEEKLEKEDFTRGKLMSSLHLKRYYGRILHYLKAKEYSHCAWTIVRVEILRNFYFINRLTGYLRN

SEQ ID NO: 279 - protein, 166 aa, Homo sapiens
MSYNLLGFLQRSSNFQCQKLLWQLNGRLEYCLKDRMNFDIPEEIKQLQQFQKEDAALTIYEMLQNIFAIFRQDSSSTGWNETIVENLLANVYHQINHLSTVLEEKLEKEDFTRGKLMSSLHLKRYYGRILHYLKAKEYSHCAWTIVRVEILRNFYFINRLTGYLRN

SEQ ID NO: 280 - protein, 166 aa, Homo sapiens
MSYNLLGFLQRSSNFQCQKLLWQLNGRLEYCLKDRMNFDIPEEIKQLQQFQKEDAALTIYEMLQNIFAIFRQDSSSTGWNETIVENLLANVYHQINHLHTVLEEKLEKEDFTRGKLMSSLHLKRYYGRILHYLKAKEYSHCAWTIVRVEILRNFYFINRLTGYLRN

SEQ ID NO: 281 - protein, 166 aa, Homo sapiens
MSYNLLGFLQRSSNFQCQKLLWQLNGRLEYCLKDRMNFDIPEEIKQLQQFQKEDAALTIYEMLQNIFAIFRQDSSSTGWNETIVENLLANVYHQINHLKTVLQEKLEKEDFTRGKLMSSLHLKRYYGRILHYLKAKEYSHCAWTIVRVEILRNFYFINRLTGYLRN

SEQ ID NO: 282 - protein, 166 aa, Homo sapiens
MSYNLLGFLQRSSNFQCQKLLWQLNGRLEYCLKDRMNFDIPEEIKQLQQFQKEDAALTIYEMLQNIFAIFRQDSSSTGWNETIVENLLANVYHQINHLKTVLHEKLEKEDFTRGKLMSSLHLKRYYGRILHYLKAKEYSHCAWTIVRVEILRNFYFINRLTGYLRN

SEQ ID NO: 283 - protein, 166 aa, Homo sapiens
MSYNLLGFLQRSSNFQCQKLLWQLNGRLEYCLKDRMNFDIPEEIKQLQQFQKEDAALTIYEMLQNIFAIFRQDSSSTGWNETIVENLLANVYHQINHLKTVLEQKLEKEDFTRGKLMSSLHLKRYYGRILHYLKAKEYSHCAWTIVRVEILRNFYFINRLTGYLRN

SEQ ID NO: 284 - protein, 166 aa, Homo sapiens
MSYNLLGFLQRSSNFQCQKLLWQLNGRLEYCLKDRMNFDIPEEIKQLQQFQKEDAALTIYEMLQNIFAIFRQDSSSTGWNETIVENLLANVYHQINHLKTVLEHKLEKEDFTRGKLMSSLHLKRYYGRILHYLKAKEYSHCAWTIVRVEILRNFYFINRLTGYLRN

SEQ ID NO: 285 - protein, 166 aa, Homo sapiens
MSYNLLGFLQRSSNFQCQKLLWQLNGRLEYCLKDRMNFDIPEEIKQLQQFQKEDAALTIYEMLQNIFAIFRQDSSSTGWNETIVENLLANVYHQINHLKTVLEEQLEKEDFTRGKLMSSLHLKRYYGRILHYLKAKEYSHCAWTIVRVEILRNFYFINRLTGYLRN

SEQ ID NO: 286 - protein, 166 aa, Homo sapiens
MSYNLLGFLQRSSNFQCQKLLWQLNGRLEYCLKDRMNFDIPEEIKQLQQFQKEDAALTIYEMLQNIFAIFRQDSSSTGWNETIVENLLANVYHQINHLKTVLEETLEKEDFTRGKLMSSLHLKRYYGRILHYLKAKEYSHCAWTIVRVEILRNFYFINRLTGYLRN

SEQ ID NO: 287 - protein, 166 aa, Homo sapiens
MSYNLLGFLQRSSNFQCQKLLWQLNGRLEYCLKDRMNFDIPEEIKQLQQFQKEDAALTIYEMLQNIFAIFRQDSSSTGWNETIVENLLANVYHQINHLKTVLEESLEKEDFTRGKLMSSLHLKRYYGRILHYLKAKEYSHCAWTIVRVEILRNFYFINRLTGYLRN

SEQ ID NO: 288 - protein, 166 aa, Homo sapiens
MSYNLLGFLQRSSNFQCQKLLWQLNGRLEYCLKDRMNFDIPEEIKQLQQFQKEDAALTIYEMLQNIFAIFRQDSSSTGWNETIVENLLANVYHQINHLKTVLEEHLEKEDFTRGKLMSSLHLKRYYGRILHYLKAKEYSHCAWTIVRVEILRNFYFINRLTGYLRN

SEQ ID NO: 289 - protein, 166 aa, Homo sapiens
MSYNLLGFLQRSSNFQCQKLLWQLNGRLEYCLKDRMNFDIPEEIKQLQQFQKEDAALTIYEMLQNIFAIFRQDSSSTGWNETIVENLLANVYHQINHLKTVLEEKLEKEDFTRGKLMSSLHLKRYYGRILHYLKAKEHSHCAWTIVRVEILRNFYFINRLTGYLRN

SEQ ID NO: 290 - protein, 166 aa, Homo sapiens
MSYNLLGFLQRSSNFQCQKLLWQLNGRLEYCLKDRMNFDIPEEIKQLQQFQKEDAALTIYEMLQNIFAIFRQDSSSTGWNETIVENLLANVYHQINHLKTVLEEKLEKEDFTRGKLMSSLHLKRYYGRILHYLKAKEISHCAWTIVRVEILRNFYFINRLTGYLRN

SEQ ID NO: 291 - protein, 166 aa, Homo sapiens
MSYNLLGFLQRSSNFQCQKLLWQLNGRLEYCLKDRMNFDIPEEIKQLQQFQKEDAALTIYEMLQNIFAIFRQDSSSTGWNETIVENLLANVYHQINHLKTVLEEKLEKEDFTRGKLMSSLHLKRYYGRILHYLKAKEYSHCAWTIVRVEILHNFYFINRLTGYLRN

SEQ ID NO: 292 - protein, 166 aa, Homo sapiens
MSYNLLGFLQRSSNFQCQKLLWQLNGRLEYCLKDRMNFDIPEEIKQLQQFQKEDAALTIYEMLQNIFAIFRQDSSSTGWNETIVENLLANVYHQINHLKTVLEEKLEKEDFTRGKLMSSLHLKRYYGRILHYLKAKEYSHCAWTIVRVEILQNFYFINRLTGYLRN

SEQ ID NO: 293 - protein, 166 aa, Homo sapiens
MSYNLLGFLQRSSNFQCQKLLWQLNGRLEYCLKDRMNFDIPEEIKQLQQFQKEDAALTIYEMLQNIFAIFRQDSSSTGWNETIVENLLANVYHQINHLKTVLEEKLEKEDFTRGKLMSSLHLKRYYGRILHYLKAKEYSHCAWTIVRVEILRNFHFINRLTGYLRN

SEQ ID NO: 294 - protein, 166 aa, Homo sapiens
MSYNLLGFLQRSSNFQCQKLLWQLNGRLEYCLKDRMNFDIPEEIKQLQQFQKEDAALTIYEMLQNIFAIFRQDSSSTGWNETIVENLLANVYHQINHLKTVLEEKLEKEDFTRGKLMSSLHLKRYYGRILHYLKAKEYSHCAWTIVRVEILRNFIFINRLTGYLRN

SEQ ID NO: 295 - protein, 166 aa, Homo sapiens
MSYNLLGFLQRSSNFQCQKLLWQLNGRLEYCLKDRMNFDIPEEIKQLQQFQKEDAALTIYEMLQNIFAIFRQDSSSTGWNETIVENLLANVYHQINHLKTVLEEKLEKEDFTRGKLMSSLHLKRYYGRILHYLKAKEYSHCAWTIVRVEILRNFYFINHLTGYLRN

SEQ ID NO: 296 - protein, 166 aa, Homo sapiens
MSYNLLGFLQRSSNFQCQKLLWQLNGRLEYCLKDRMNFDIPEEIKQLQQFQKEDAALTIYEMLQNIFAIFRQDSSSTGWNETIVENLLANVYHQINHLKTVLEEKLEKEDFTRGKLMSSLHLKRYYGRILHYLKAKEYSHCAWTIVRVEILRNFYFINQLTGYLRN

SEQ ID NO: 297 - protein, 166 aa, Homo sapiens
DSYNLLGFLQRSSNFQCQKLLWQLNGRLEYCLKDRMNFDIPEEIKQLQQFQKEDAALTIYEMLQNIFAIFRQDSSSTGWNETIVENLLANVYHQINHLKTVLEEKLEKEDFTRGKLMSSLHLKRYYGRILHYLKAKEYSHCAWTIVRVEILRNFYFINRLTGYLRN

SEQ ID NO: 298 - protein, 166 aa, Homo sapiens
ESYNLLGFLQRSSNFQCQKLLWQLNGRLEYCLKDRMNFDIPEEIKQLQQFQKEDAALTIYEMLQNIFAIFRQDSSSTGWNETIVENLLANVYHQINHLKTVLEEKLEKEDFTRGKLMSSLHLKRYYGRILHYLKAKEYSHCAWTIVRVEILRNFYFINRLTGYLRN

SEQ ID NO: 299 - protein, 166 aa, Homo sapiens
KSYNLLGFLQRSSNFQCQKLLWQLNGRLEYCLKDRMNFDIPEEIKQLQQFQKEDAALTIYEMLQNIFAIFRQDSSSTGWNETIVENLLANVYHQINHLKTVLEEKLEKEDFTRGKLMSSLHLKRYYGRILHYLKAKEYSHCAWTIVRVEILRNFYFINRLTGYLRN

SEQ ID NO: 300 - protein, 166 aa, Homo sapiens
NSYNLLGFLQRSSNFQCQKLLWQLNGRLEYCLKDRMNFDIPEEIKQLQQFQKEDAALTIYEMLQNIFAIFRQDSSSTGWNETIVENLLANVYHQINHLKTVLEEKLEKEDFTRGKLMSSLHLKRYYGRILHYLKAKEYSHCAWTIVRVEILRNFYFINRLTGYLRN

SEQ ID NO: 301 - protein, 166 aa, Homo sapiens
RSYNLLGFLQRSSNFQCQKLLWQLNGRLEYCLKDRMNFDIPEEIKQLQQFQKEDAALTIYEMLQNIFAIFRQDSSSTGWNETIVENLLANVYHQINHLKTVLEEKLEKEDFTRGKLMSSLHLKRYYGRILHYLKAKEYSHCAWTIVRVEILRNFYFINRLTGYLRN

SEQ ID NO: 302 - protein, 166 aa, Homo sapiens
SSYNLLGFLQRSSNFQCQKLLWQLNGRLEYCLKDRMNFDIPEEIKQLQQFQKEDAALTIYEMLQNIFAIFRQDSSSTGWNETIVENLLANVYHQINHLKTVLEEKLEKEDFTRGKLMSSLHLKRYYGRILHYLKAKEYSHCAWTIVRVEILRNFYFINRLTGYLRN

SEQ ID NO: 303 - protein, 166 aa, Homo sapiens
MSYNDLGFLQRSSNFQCQKLLWQLNGRLEYCLKDRMNFDIPEEIKQLQQFQKEDAALTIYEMLQNIFAIFRQDSSSTGWNETIVENLLANVYHQINHLKTVLEEKLEKEDFTRGKLMSSLHLKRYYGRILHYLKAKEYSHCAWTIVRVEILRNFYFINRLTGYLRN

SEQ ID NO: 304 - protein, 166 aa, Homo sapiens
MSYNELGFLQRSSNFQCQKLLWQLNGRLEYCLKDRMNFDIPEEIKQLQQFQKEDAALTIYEMLQNIFAIFRQDSSSTGWNETIVENLLANVYHQINHLKTVLEEKLEKEDFTRGKLMSSLHLKRYYGRILHYLKAKEYSHCAWTIVRVEILRNFYFINRLTGYLRN

SEQ ID NO: 305 - protein, 166 aa, Homo sapiens
MSYNKLGFLQRSSNFQCQKLLWQLNGRLEYCLKDRMNFDIPEEIKQLQQFQKEDAALTIYEMLQNIFAIFRQDSSSTGWNETIVENLLANVYHQINHLKTVLEEKLEKEDFTRGKLMSSLHLKRYYGRILHYLKAKEYSHCAWTIVRVEILRNFYFINRLTGYLRN

SEQ ID NO: 306 - protein, 166 aa, Homo sapiens
MSYNRLGFLQRSSNFQCQKLLWQLNGRLEYCLKDRMNFDIPEEIKQLQQFQKEDAALTIYEMLQNIFAIFRQDSSSTGWNETIVENLLANVYHQINHLKTVLEEKLEKEDFTRGKLMSSLHLKRYYGRILHYLKAKEYSHCAWTIVRVEILRNFYFINRLTGYLRN

SEQ ID NO: 307 - protein, 166 aa, Homo sapiens
MSYNNLGFLQRSSNFQCQKLLWQLNGRLEYCLKDRMNFDIPEEIKQLQQFQKEDAALTIYEMLQNIFAIFRQDSSSTGWNETIVENLLANVYHQINHLKTVLEEKLEKEDFTRGKLMSSLHLKRYYGRILHYLKAKEYSHCAWTIVRVEILRNFYFINRLTGYLRN

SEQ ID NO: 308 - protein, 166 aa, Homo sapiens
MSYNSLGFLQRSSNFQCQKLLWQLNGRLEYCLKDRMNFDIPEEIKQLQQFQKEDAALTIYEMLQNIFAIFRQDSSSTGWNETIVENLLANVYHQINHLKTVLEEKLEKEDFTRGKLMSSLHLKRYYGRILHYLKAKEYSHCAWTIVRVEILRNFYFINRLTGYLRN

SEQ ID NO: 309 - protein, 166 aa, Homo sapiens
MSYNLDGFLQRSSNFQCQKLLWQLNGRLEYCLKDRMNFDIPEEIKQLQQFQKEDAALTIYEMLQNIFAIFRQDSSSTGWNETIVENLLANVYHQINHLKTVLEEKLEKEDFTRGKLMSSLHLKRYYGRILHYLKAKEYSHCAWTIVRVEILRNFYFINRLTGYLRN

SEQ ID NO: 310 - protein, 166 aa, Homo sapiens
MSYNLEGFLQRSSNFQCQKLLWQLNGRLEYCLKDRMNFDIPEEIKQLQQFQKEDAALTIYEMLQNIFAIFRQDSSSTGWNETIVENLLANVYHQINHLKTVLEEKLEKEDFTRGKLMSSLHLKRYYGRILHYLKAKEYSHCAWTIVRVEILRNFYFINRLTGYLRN

SEQ ID NO: 311 - protein, 166 aa, Homo sapiens
MSYNLKGFLQRSSNFQCQKLLWQLNGRLEYCLKDRMNFDIPEEIKQLQQFQKEDAALTIYEMLQNIFAIFRQDSSSTGWNETIVENLLANVYHQINHLKTVLEEKLEKEDFTRGKLMSSLHLKRYYGRILHYLKAKEYSHCAWTIVRVEILRNFYFINRLTGYLRN

SEQ ID NO: 312 - protein, 166 aa, Homo sapiens
MSYNLNGFLQRSSNFQCQKLLWQLNGRLEYCLKDRMNFDIPEEIKQLQQFQKEDAALTIYEMLQNIFAIFRQDSSSTGWNETIVENLLANVYHQINHLKTVLEEKLEKEDFTRGKLMSSLHLKRYYGRILHYLKAKEYSHCAWTIVRVEILRNFYFINRLTGYLRN

SEQ ID NO: 313 - protein, 166 aa, Homo sapiens
MSYNLQGFLQRSSNFQCQKLLWQLNGRLEYCLKDRMNFDIPEEIKQLQQFQKEDAALTIYEMLQNIFAIFRQDSSSTGWNETIVENLLANVYHQINHLKTVLEEKLEKEDFTRGKLMSSLHLKRYYGRILHYLKAKEYSHCAWTIVRVEILRNFYFINRLTGYLRN

SEQ ID NO: 314 - protein, 166 aa, Homo sapiens
MSYNLRGFLQRSSNFQCQKLLWQLNGRLEYCLKDRMNFDIPEEIKQLQQFQKEDAALTIYEMLQNIFAIFRQDSSSTGWNETIVENLLANVYHQINHLKTVLEEKLEKEDFTRGKLMSSLHLKRYYGRILHYLKAKEYSHCAWTIVRVEILRNFYFINRLTGYLRN

SEQ ID NO: 315 - protein, 166 aa, Homo sapiens
MSYNLSGFLQRSSNFQCQKLLWQLNGRLEYCLKDRMNFDIPEEIKQLQQFQKEDAALTIYEMLQNIFAIFRQDSSSTGWNETIVENLLANVYHQINHLKTVLEEKLEKEDFTRGKLMSSLHLKRYYGRILHYLKAKEYSHCAWTIVRVEILRNFYFINRLTGYLRN

SEQ ID NO: 316 - protein, 166 aa, Homo sapiens
MSYNLTGFLQRSSNFQCQKLLWQLNGRLEYCLKDRMNFDIPEEIKQLQQFQKEDAALTIYEMLQNIFAIFRQDSSSTGWNETIVENLLANVYHQINHLKTVLEEKLEKEDFTRGKLMSSLHLKRYYGRILHYLKAKEYSHCAWTIVRVEILRNFYFINRLTGYLRN

SEQ ID NO: 317 - protein, 166 aa, Homo sapiens
MSYNLLGDLQRSSNFQCQKLLWQLNGRLEYCLKDRMNFDIPEEIKQLQQFQKEDAALTIYEMLQNIFAIFRQDSSSTGWNETIVENLLANVYHQINHLKTVLEEKLEKEDFTRGKLMSSLHLKRYYGRILHYLKAKEYSHCAWTIVRVEILRNFYFINRLTGYLRN

SEQ ID NO: 318 - protein, 166 aa, Homo sapiens
MSYNLLGELQRSSNFQCQKLLWQLNGRLEYCLKDRMNFDIPEEIKQLQQFQKEDAALTIYEMLQNIFAIFRQDSSSTGWNETIVENLLANVYHQINHLKTVLEEKLEKEDFTRGKLMSSLHLKRYYGRILHYLKAKEYSHCAWTIVRVEILRNFYFINRLTGYLRN

SEQ ID NO: 319 - protein, 166 aa, Homo sapiens
MSYNLLGKLQRSSNFQCQKLLWQLNGRLEYCLKDRMNFDIPEEIKQLQQFQKEDAALTIYEMLQNIFAIFRQDSSSTGWNETIVENLLANVYHQINHLKTVLEEKLEKEDFTRGKLMSSLHLKRYYGRILHYLKAKEYSHCAWTIVRVEILRNFYFINRLTGYLRN

SEQ ID NO: 320 - protein, 166 aa, Homo sapiens
MSYNLLGRLQRSSNFQCQKLLWQLNGRLEYCLKDRMNFDIPEEIKQLQQFQKEDAALTIYEMLQNIFAIFRQDSSSTGWNETIVENLLANVYHQINHLKTVLEEKLEKEDFTRGKLMSSLHLKRYYGRILHYLKAKEYSHCAWTIVRVEILRNFYFINRLTGYLRN

SEQ ID NO: 321 - protein, 166 aa, Homo sapiens
MSYNLLGFDQRSSNFQCQKLLWQLNGRLEYCLKDRMNFDIPEEIKQLQQFQKEDAALTIYEMLQNIFAIFRQDSSSTGWNETIVENLLANVYHQINHLKTVLEEKLEKEDFTRGKLMSSLHLKRYYGRILHYLKAKEYSHCAWTIVRVEILRNFYFINRLTGYLRN

SEQ ID NO: 322 - protein, 166 aa, Homo sapiens
MSYNLLGFEQRSSNFQCQKLLWQLNGRLEYCLKDRMNFDIPEEIKQLQQFQKEDAALTIYEMLQNIFAIFRQDSSSTGWNETIVENLLANVYHQINHLKTVLEEKLEKEDFTRGKLMSSLHLKRYYGRILHYLKAKEYSHCAWTIVRVEILRNFYFINRLTGYLRN

SEQ ID NO: 323 - protein, 166 aa, Homo sapiens
MSYNLLGFKQRSSNFQCQKLLWQLNGRLEYCLKDRMNFDIPEEIKQLQQFQKEDAALTIYEMLQNIFAIFRQDSSSTGWNETIVENLLANVYHQINHLKTVLEEKLEKEDFTRGKLMSSLHLKRYYGRILHYLKAKEYSHCAWTIVRVEILRNFYFINRLTGYLRN

SEQ ID NO: 324 - protein, 166 aa, Homo sapiens
MSYNLLGFNQRSSNFQCQKLLWQLNGRLEYCLKDRMNFDIPEEIKQLQQFQKEDAALTIYEMLQNIFAIFRQDSSSTGWNETIVENLLANVYHQINHLKTVLEEKLEKEDFTRGKLMSSLHLKRYYGRILHYLKAKEYSHCAWTIVRVEILRNFYFINRLTGYLRN

SEQ ID NO: 325 - protein, 166 aa, Homo sapiens
MSYNLLGFRQRSSNFQCQKLLWQLNGRLEYCLKDRMNFDIPEEIKQLQQFQKEDAALTIYEMLQNIFAIFRQDSSSTGWNETIVENLLANVYHQINHLKTVLEEKLEKEDFTRGKLMSSLHLKRYYGRILHYLKAKEYSHCAWTIVRVEILRNFYFINRLTGYLRN

SEQ ID NO: 326 - protein, 166 aa, Homo sapiens
MSYNLLGFSQRSSNFQCQKLLWQLNGRLEYCLKDRMNFDIPEEIKQLQQFQKEDAALTIYEMLQNIFAIFRQDSSSTGWNETIVENLLANVYHQINHLKTVLEEKLEKEDFTRGKLMSSLHLKRYYGRILHYLKAKEYSHCAWTIVRVEILRNFYFINRLTGYLRN

SEQ ID NO: 327 - protein, 166 aa, Homo sapiens
MSYNLLGFLDRSSNFQCQKLLWQLNGRLEYCLKDRMNFDIPEEIKQLQQFQKEDAALTIYEMLQNIFAIFRQDSSSTGWNETIVENLLANVYHQINHLKTVLEEKLEKEDFTRGKLMSSLHLKRYYGRILHYLKAKEYSHCAWTIVRVEILRNFYFINRLTGYLRN

SEQ ID NO: 328 - protein, 166 aa, Homo sapiens
MSYNLLGFLERSSNFQCQKLLWQLNGRLEYCLKDRMNFDIPEEIKQLQQFQKEDAALTIYEMLQNIFAIFRQDSSSTGWNETIVENLLANVYHQINHLKTVLEEKLEKEDFTRGKLMSSLHLKRYYGRILHYLKAKEYSHCAWTIVRVEILRNFYFINRLTGYLRN

SEQ ID NO: 329 - protein, 166 aa, Homo sapiens
MSYNLLGFLKRSSNFQCQKLLWQLNGRLEYCLKDRMNFDIPEEIKQLQQFQKEDAALTIYEMLQNIFAIFRQDSSSTGWNETIVENLLANVYHQINHLKTVLEEKLEKEDFTRGKLMSSLHLKRYYGRILHYLKAKEYSHCAWTIVRVEILRNFYFINRLTGYLRN

SEQ ID NO: 330 - protein, 166 aa, Homo sapiens
MSYNLLGFLNRSSNFQCQKLLWQLNGRLEYCLKDRMNFDIPEEIKQLQQFQKEDAALTIYEMLQNIFAIFRQDSSSTGWNETIVENLLANVYHQINHLKTVLEEKLEKEDFTRGKLMSSLHLKRYYGRILHYLKAKEYSHCAWTIVRVEILRNFYFINRLTGYLRN

SEQ ID NO: 331 - protein, 166 aa, Homo sapiens
MSYNLLGFLRRSSNFQCQKLLWQLNGRLEYCLKDRMNFDIPEEIKQLQQFQKEDAALTIYEMLQNIFAIFRQDSSSTGWNETIVENLLANVYHQINHLKTVLEEKLEKEDFTRGKLMSSLHLKRYYGRILHYLKAKEYSHCAWTIVRVEILRNFYFINRLTGYLRN

SEQ ID NO: 332 - protein, 166 aa, Homo sapiens
MSYNLLGFLSRSSNFQCQKLLWQLNGRLEYCLKDRMNFDIPEEIKQLQQFQKEDAALTIYEMLQNIFAIFRQDSSSTGWNETIVENLLANVYHQINHLKTVLEEKLEKEDFTRGKLMSSLHLKRYYGRILHYLKAKEYSHCAWTIVRVEILRNFYFINRLTGYLRN

SEQ ID NO: 333 - protein, 166 aa, Homo sapiens
MSYNLLGFLTRSSNFQCQKLLWQLNGRLEYCLKDRMNFDIPEEIKQLQQFQKEDAALTIYEMLQNIFAIFRQDSSSTGWNETIVENLLANVYHQINHLKTVLEEKLEKEDFTRGKLMSSLHLKRYYGRILHYLKAKEYSHCAWTIVRVEILRNFYFINRLTGYLRN

SEQ ID NO: 334 - protein, 166 aa, Homo sapiens
MSYNLLGFLQRDSNFQCQKLLWQLNGRLEYCLKDRMNFDIPEEIKQLQQFQKEDAALTIYEMLQNIFAIFRQDSSSTGWNETIVENLLANVYHQINHLKTVLEEKLEKEDFTRGKLMSSLHLKRYYGRILHYLKAKEYSHCAWTIVRVEILRNFYFINRLTGYLRN

SEQ ID NO: 335 - protein, 166 aa, Homo sapiens
MSYNLLGFLQRESNFQCQKLLWQLNGRLEYCLKDRMNFDIPEEIKQLQQFQKEDAALTIYEMLQNIFAIFRQDSSSTGWNETIVENLLANVYHQINHLKTVLEEKLEKEDFTRGKLMSSLHLKRYYGRILHYLKAKEYSHCAWTIVRVEILRNFYFINRLTGYLRN

SEQ ID NO: 336 - protein, 166 aa, Homo sapiens
MSYNLLGFLQRKSNFQCQKLLWQLNGRLEYCLKDRMNFDIPEEIKQLQQFQKEDAALTIYEMLQNIFAIFRQDSSSTGWNETIVENLLANVYHQINHLKTVLEEKLEKEDFTRGKLMSSLHLKRYYGRILHYLKAKEYSHCAWTIVRVEILRNFYFINRLTGYLRN

SEQ ID NO: 337 - protein, 166 aa, Homo sapiens
MSYNLLGFLQRRSNFQCQKLLWQLNGRLEYCLKDRMNFDIPEEIKQLQQFQKEDAALTIYEMLQNIFAIFRQDSSSTGWNETIVENLLANVYHQINHLKTVLEEKLEKEDFTRGKLMSSLHLKRYYGRILHYLKAKEYSHCAWTIVRVEILRNFYFINRLTGYLRN

SEQ ID NO: 338 - protein, 166 aa, Homo sapiens
MSYNLLGFLQRSDNFQCQKLLWQLNGRLEYCLKDRMNFDIPEEIKQLQQFQKEDAALTIYEMLQNIFAIFRQDSSSTGWNETIVENLLANVYHQINHLKTVLEEKLEKEDFTRGKLMSSLHLKRYYGRILHYLKAKEYSHCAWTIVRVEILRNFYFINRLTGYLRN

SEQ ID NO: 339 - protein, 166 aa, Homo sapiens
MSYNLLGFLQRSENFQCQKLLWQLNGRLEYCLKDRMNFDIPEEIKQLQQFQKEDAALTIYEMLQNIFAIFRQDSSSTGWNETIVENLLANVYHQINHLKTVLEEKLEKEDFTRGKLMSSLHLKRYYGRILHYLKAKEYSHCAWTIVRVEILRNFYFINRLTGYLRN

SEQ ID NO: 340 - protein, 166 aa, Homo sapiens
MSYNLLGFLQRSKNFQCQKLLWQLNGRLEYCLKDRMNFDIPEEIKQLQQFQKEDAALTIYEMLQNIFAIFRQDSSSTGWNETIVENLLANVYHQINHLKTVLEEKLEKEDFTRGKLMSSLHLKRYYGRILHYLKAKEYSHCAWTIVRVEILRNFYFINRLTGYLRN

SEQ ID NO: 341 - protein, 166 aa, Homo sapiens
MSYNLLGFLQRSNNFQCQKLLWQLNGRLEYCLKDRMNFDIPEEIKQLQQFQKEDAALTIYEMLQNIFAIFRQDSSSTGWNETIVENLLANVYHQINHLKTVLEEKLEKEDFTRGKLMSSLHLKRYYGRILHYLKAKEYSHCAWTIVRVEILRNFYFINRLTGYLRN

SEQ ID NO: 342 - protein, 166 aa, Homo sapiens
MSYNLLGFLQRSQNFQCQKLLWQLNGRLEYCLKDRMNFDIPEEIKQLQQFQKEDAALTIYEMLQNIFAIFRQDSSSTGWNETIVENLLANVYHQINHLKTVLEEKLEKEDFTRGKLMSSLHLKRYYGRILHYLKAKEYSHCAWTIVRVEILRNFYFINRLTGYLRN

SEQ ID NO: 343 - protein, 166 aa, Homo sapiens [sequence omitted]

SEQ ID NO: 344 - protein, 166 aa, Homo sapiens
MSYNLLGFLQRSTNFQCQKLLWQLNGRLEYCLKDRMNFDIPEEIKQLQQFQKEDAALTIYEMLQNIFAIFRQDSSSTGWNETIVENLLANVYHQINHLKTVLEEKLEKEDFTRGKLMSSLHLKRYYGRILHYLKAKEYSHCAWTIVRVEILRNFYFINRLTGYLRN

SEQ ID NO: 345 - protein, 166 aa, Homo sapiens
MSYNLLGFLQRSSDFQCQKLLWQLNGRLEYCLKDRMNFDIPEEIKQLQQFQKEDAALTIYEMLQNIFAIFRQDSSSTGWNETIVENLLANVYHQINHLKTVLEEKLEKEDFTRGKLMSSLHLKRYYGRILHYLKAKEYSHCAWTIVRVEILRNFYFINRLTGYLRN

SEQ ID NO: 346 - protein, 166 aa, Homo sapiens
MSYNLLGFLQRSSEFQCQKLLWQLNGRLEYCLKDRMNFDIPEEIKQLQQFQKEDAALTIYEMLQNIFAIFRQDSSSTGWNETIVENLLANVYHQINHLKTVLEEKLEKEDFTRGKLMSSLHLKRYYGRILHYLKAKEYSHCAWTIVRVEILRNFYFINRLTGYLRN

SEQ ID NO: 347 - protein, 166 aa, Homo sapiens
MSYNLLGFLQRSSKFQCQKLLWQLNGRLEYCLKDRMNFDIPEEIKQLQQFQKEDAALTIYEMLQNIFAIFRQDSSSTGWNETIVENLLANVYHQINHLKTVLEEKLEKEDFTRGKLMSSLHLKRYYGRILHYLKAKEYSHCAWTIVRVEILRNFYFINRLTGYLRN

SEQ ID NO: 348 - protein, 166 aa, Homo sapiens
MSYNLLGFLQRSSQFQCQKLLWQLNGRLEYCLKDRMNFDIPEEIKQLQQFQKEDAALTIYEMLQNIFAIFRQDSSSTGWNETIVENLLANVYHQINHLKTVLEEKLEKEDFTRGKLMSSLHLKRYYGRILHYLKAKEYSHCAWTIVRVEILRNFYFINRLTGYLRN

SEQ ID NO: 349 - protein, 166 aa, Homo sapiens
MSYNLLGFLQRSSRFQCQKLLWQLNGRLEYCLKDRMNFDIPEEIKQLQQFQKEDAALTIYEMLQNIFAIFRQDSSSTGWNETIVENLLANVYHQINHLKTVLEEKLEKEDFTRGKLMSSLHLKRYYGRILHYLKAKEYSHCAWTIVRVEILRNFYFINRLTGYLRN

SEQ ID NO: 350 - protein, 166 aa, Homo sapiens
MSYNLLGFLQRSSSFQCQKLLWQLNGRLEYCLKDRMNFDIPEEIKQLQQFQKEDAALTIYEMLQNIFAIFRQDSSSTGWNETIVENLLANVYHQINHLKTVLEEKLEKEDFTRGKLMSSLHLKRYYGRILHYLKAKEYSHCAWTIVRVEILRNFYFINRLTGYLRN

SEQ ID NO: 351 - protein, 166 aa, Homo sapiens
MSYNLLGFLQRSSTFQCQKLLWQLNGRLEYCLKDRMNFDIPEEIKQLQQFQKEDAALTIYEMLQNIFAIFRQDSSSTGWNETIVENLLANVYHQINHLKTVLEEKLEKEDFTRGKLMSSLHLKRYYGRILHYLKAKEYSHCAWTIVRVEILRNFYFINRLTGYLRN

SEQ ID NO: 352 - protein, 166 aa, Homo sapiens
MSYNLLGFLQRSSNDQCQKLLWQLNGRLEYCLKDRMNFDIPEEIKQLQQFQKEDAALTIYEMLQNIFAIFRQDSSSTGWNETIVENLLANVYHQINHLKTVLEEKLEKEDFTRGKLMSSLHLKRYYGRILHYLKAKEYSHCAWTIVRVEILRNFYFINRLTGYLRN

SEQ ID NO: 353 - protein, 166 aa, Homo sapiens
MSYNLLGFLQRSSNEQCQKLLWQLNGRLEYCLKDRMNFDIPEEIKQLQQFQKEDAALTIYEMLQNIFAIFRQDSSSTGWNETIVENLLANVYHQINHLKTVLEEKLEKEDFTRGKLMSSLHLKRYYGRILHYLKAKEYSHCAWTIVRVEILRNFYFINRLTGYLRN

SEQ ID NO: 354 - protein, 166 aa, Homo sapiens
MSYNLLGFLQRSSNKQCQKLLWQLNGRLEYCLKDRMNFDIPEEIKQLQQFQKEDAALTIYEMLQNIFAIFRQDSSSTGWNETIVENLLANVYHQINHLKTVLEEKLEKEDFTRGKLMSSLHLKRYYGRILHYLKAKEYSHCAWTIVRVEILRNFYFINRLTGYLRN

SEQ ID NO: 355 - protein, 166 aa, Homo sapiens
MSYNLLGFLQRSSNRQCQKLLWQLNGRLEYCLKDRMNFDIPEEIKQLQQFQKEDAALTIYEMLQNIFAIFRQDSSSTGWNETIVENLLANVYHQINHLKTVLEEKLEKEDFTRGKLMSSLHLKRYYGRILHYLKAKEYSHCAWTIVRVEILRNFYFINRLTGYLRN

SEQ ID NO: 356 - protein, 166 aa, Homo sapiens
MSYNLLGFLQRSSNFDCQKLLWQLNGRLEYCLKDRMNFDIPEEIKQLQQFQKEDAALTIYEMLQNIFAIFRQDSSSTGWNETIVENLLANVYHQINHLKTVLEEKLEKEDFTRGKLMSSLHLKRYYGRILHYLKAKEYSHCAWTIVRVEILRNFYFINRLTGYLRN

SEQ ID NO: 357 - protein, 166 aa, Homo sapiens
MSYNLLGFLQRSSNFECQKLLWQLNGRLEYCLKDRMNFDIPEEIKQLQQFQKEDAALTIYEMLQNIFAIFRQDSSSTGWNETIVENLLANVYHQINHLKTVLEEKLEKEDFTRGKLMSSLHLKRYYGRILHYLKAKEYSHCAWTIVRVEILRNFYFINRLTGYLRN

SEQ ID NO: 358 - protein, 166 aa, Homo sapiens
MSYNLLGFLQRSSNFKCQKLLWQLNGRLEYCLKDRMNFDIPEEIKQLQQFQKEDAALTIYEMLQNIFAIFRQDSSSTGWNETIVENLLANVYHQINHLKTVLEEKLEKEDFTRGKLMSSLHLKRYYGRILHYLKAKEYSHCAWTIVRVEILRNFYFINRLTGYLRN

SEQ ID NO: 359 - protein, 166 aa, Homo sapiens
MSYNLLGFLQRSSNFNCQKLLWQLNGRLEYCLKDRMNFDIPEEIKQLQQFQKEDAALTIYEMLQNIFAIFRQDSSSTGWNETIVENLLANVYHQINHLKTVLEEKLEKEDFTRGKLMSSLHLKRYYGRILHYLKAKEYSHCAWTIVRVEILRNFYFINRLTGYLRN

SEQ ID NO: 360 - protein, 166 aa, Homo sapiens
MSYNLLGFLQRSSNFRCQKLLWQLNGRLEYCLKDRMNFDIPEEIKQLQQFQKEDAALTIYEMLQNIFAIFRQDSSSTGWNETIVENLLANVYHQINHLKTVLEEKLEKEDFTRGKLMSSLHLKRYYGRILHYLKAKEYSHCAWTIVRVEILRNFYFINRLTGYLRN

SEQ ID NO: 361 - protein, 166 aa, Homo sapiens
MSYNLLGFLQRSSNFSCQKLLWQLNGRLEYCLKDRMNFDIPEEIKQLQQFQKEDAALTIYEMLQNIFAIFRQDSSSTGWNETIVENLLANVYHQINHLKTVLEEKLEKEDFTRGKLMSSLHLKRYYGRILHYLKAKEYSHCAWTIVRVEILRNFYFINRLTGYLRN

SEQ ID NO: 362 - protein, 166 aa, Homo sapiens
MSYNLLGFLQRSSNFTCQKLLWQLNGRLEYCLKDRMNFDIPEEIKQLQQFQKEDAALTIYEMLQNIFAIFRQDSSSTGWNETIVENLLANVYHQINHLKTVLEEKLEKEDFTRGKLMSSLHLKRYYGRILHYLKAKEYSHCAWTIVRVEILRNFYFINRLTGYLRN

SEQ ID NO: 363 - protein, 166 aa, Homo sapiens
MSYNLLGFLQRSSNFQDQKLLWQLNGRLEYCLKDRMNFDIPEEIKQLQQFQKEDAALTIYEMLQNIFAIFRQDSSSTGWNETIVENLLANVYHQINHLKTVLEEKLEKEDFTRGKLMSSLHLKRYYGRILHYLKAKEYSHCAWTIVRVEILRNFYFINRLTGYLRN

SEQ ID NO: 364 - protein, 166 aa, Homo sapiens
MSYNLLGFLQRSSNFQEQKLLWQLNGRLEYCLKDRMNFDIPEEIKQLQQFQKEDAALTIYEMLQNIFAIFRQDSSSTGWNETIVENLLANVYHQINHLKTVLEEKLEKEDFTRGKLMSSLHLKRYYGRILHYLKAKEYSHCAWTIVRVEILRNFYFINRLTGYLRN

SEQ ID NO: 365 - protein, 166 aa, Homo sapiens
MSYNLLGFLQRSSNFQKQKLLWQLNGRLEYCLKDRMNFDIPEEIKQLQQFQKEDAALTIYEMLQNIFAIFRQDSSSTGWNETIVENLLANVYHQINHLKTVLEEKLEKEDFTRGKLMSSLHLKRYYGRILHYLKAKEYSHCAWTIVRVEILRNFYFINRLTGYLRN

SEQ ID NO: 366 - protein, 166 aa, Homo sapiens
MSYNLLGFLQRSSNFQNQKLLWQLNGRLEYCLKDRMNFDIPEEIKQLQQFQKEDAALTIYEMLQNIFAIFRQDSSSTGWNETIVENLLANVYHQINHLKTVLEEKLEKEDFTRGKLMSSLHLKRYYGRILHYLKAKEYSHCAWTIVRVEILRNFYFINRLTGYLRN

SEQ ID NO: 367 - protein, 166 aa, Homo sapiens
MSYNLLGFLQRSSNFQQQKLLWQLNGRLEYCLKDRMNFDIPEEIKQLQQFQKEDAALTIYEMLQNIFAIFRQDSSSTGWNETIVENLLANVYHQINHLKTVLEEKLEKEDFTRGKLMSSLHLKRYYGRILHYLKAKEYSHCAWTIVRVEILRNFYFINRLTGYLRN

SEQ ID NO: 368 - protein, 166 aa, Homo sapiens
MSYNLLGFLQRSSNFQRQKLLWQLNGRLEYCLKDRMNFDIPEEIKQLQQFQKEDAALTIYEMLQNIFAIFRQDSSSTGWNETIVENLLANVYHQINHLKTVLEEKLEKEDFTRGKLMSSLHLKRYYGRILHYLKAKEYSHCAWTIVRVEILRNFYFINRLTGYLRN

SEQ ID NO: 369 - protein, 166 aa, Homo sapiens
MSYNLLGFLQRSSNFQSQKLLWQLNGRLEYCLKDRMNFDIPEEIKQLQQFQKEDAALTIYEMLQNIFAIFRQDSSSTGWNETIVENLLANVYHQINHLKTVLEEKLEKEDFTRGKLMSSLHLKRYYGRILHYLKAKEYSHCAWTIVRVEILRNFYFINRLTGYLRN

SEQ ID NO: 370 - protein, 166 aa, Homo sapiens
MSYNLLGFLQRSSNFQTQKLLWQLNGRLEYCLKDRMNFDIPEEIKQLQQFQKEDAALTIYEMLQNIFAIFRQDSSSTGWNETIVENLLANVYHQINHLKTVLEEKLEKEDFTRGKLMSSLHLKRYYGRILHYLKAKEYSHCAWTIVRVEILRNFYFINRLTGYLRN

SEQ ID NO: 371 - protein, 166 aa, Homo sapiens
MSYNLLGFLQRSSNFQCQKNLWQLNGRLEYCLKDRMNFDIPEEIKQLQQFQKEDAALTIYEMLQNIFAIFRQDSSSTGWNETIVENLLANVYHQINHLKTVLEEKLEKEDFTRGKLMSSLHLKRYYGRILHYLKAKEYSHCAWTIVRVEILRNFYFINRLTGYLRN

SEQ ID NO: 372 - protein, 166 aa, Homo sapiens
MSYNLLGFLQRSSNFQCQKQLWQLNGRLEYCLKDRMNFDIPEEIKQLQQFQKEDAALTIYEMLQNIFAIFRQDSSSTGWNETIVENLLANVYHQINHLKTVLEEKLEKEDFTRGKLMSSLHLKRYYGRILHYLKAKEYSHCAWTIVRVEILRNFYFINRLTGYLRN

SEQ ID NO: 373 - protein, 166 aa, Homo sapiens
MSYNLLGFLQRSSNFQCQKRLWQLNGRLEYCLKDRMNFDIPEEIKQLQQFQKEDAALTIYEMLQNIFAIFRQDSSSTGWNETIVENLLANVYHQINHLKTVLEEKLEKEDFTRGKLMSSLHLKRYYGRILHYLKAKEYSHCAWTIVRVEILRNFYFINRLTGYLRN

SEQ ID NO: 374 - protein, 166 aa, Homo sapiens
MSYNLLGFLQRSSNFQCQKSLWQLNGRLEYCLKDRMNFDIPEEIKQLQQFQKEDAALTIYEMLQNIFAIFRQDSSSTGWNETIVENLLANVYHQINHLKTVLEEKLEKEDFTRGKLMSSLHLKRYYGRILHYLKAKEYSHCAWTIVRVEILRNFYFINRLTGYLRN

SEQ ID NO: 375 - protein, 166 aa, Homo sapiens
MSYNLLGFLQRSSNFQCQKTLWQLNGRLEYCLKDRMNFDIPEEIKQLQQFQKEDAALTIYEMLQNIFAIFRQDSSSTGWNETIVENLLANVYHQINHLKTVLEEKLEKEDFTRGKLMSSLHLKRYYGRILHYLKAKEYSHCAWTIVRVEILRNFYFINRLTGYLRN

SEQ ID NO: 376 - protein, 166 aa, Homo sapiens
MSYNLLGFLQRSSNFQCQKDLWQLNGRLEYCLKDRMNFDIPEEIKQLQQFQKEDAALTIYEMLQNIFAIFRQDSSSTGWNETIVENLLANVYHQINHLKTVLEEKLEKEDFTRGKLMSSLHLKRYYGRILHYLKAKEYSHCAWTIVRVEILRNFYFINRLTGYLRN

SEQ ID NO: 377 - protein, 166 aa, Homo sapiens
MSYNLLGFLQRSSNFQCQKELWQLNGRLEYCLKDRMNFDIPEEIKQLQQFQKEDAALTIYEMLQNIFAIFRQDSSSTGWNETIVENLLANVYHQINHLKTVLEEKLEKEDFTRGKLMSSLHLKRYYGRILHYLKAKEYSHCAWTIVRVEILRNFYFINRLTGYLRN

SEQ ID NO: 378 - protein, 166 aa, Homo sapiens
MSYNLLGFLQRSSNFQCQKKLWQLNGRLEYCLKDRMNFDIPEEIKQLQQFQKEDAALTIYEMLQNIFAIFRQDSSSTGWNETIVENLLANVYHQINHLKTVLEEKLEKEDFTRGKLMSSLHLKRYYGRILHYLKAKEYSHCAWTIVRVEILRNFYFINRLTGYLRN

SEQ ID NO: 379 - protein, 166 aa, Homo sapiens
MSYNLLGFLQRSSNFQCQKLLDQLNGRLEYCLKDRMNFDIPEEIKQLQQFQKEDAALTIYEMLQNIFAIFRQDSSSTGWNETIVENLLANVYHQINHLKTVLEEKLEKEDFTRGKLMSSLHLKRYYGRILHYLKAKEYSHCAWTIVRVEILRNFYFINRLTGYLRN

SEQ ID NO: 380 - protein, 166 aa, Homo sapiens
MSYNLLGFLQRSSNFQCQKLLEQLNGRLEYCLKDRMNFDIPEEIKQLQQFQKEDAALTIYEMLQNIFAIFRQDSSSTGWNETIVENLLANVYHQINHLKTVLEEKLEKEDFTRGKLMSSLHLKRYYGRILHYLKAKEYSHCAWTIVRVEILRNFYFINRLTGYLRN

SEQ ID NO: 381 - protein, 166 aa, Homo sapiens
MSYNLLGFLQRSSNFQCQKLLKQLNGRLEYCLKDRMNFDIPEEIKQLQQFQKEDAALTIYEMLQNIFAIFRQDSSSTGWNETIVENLLANVYHQINHLKTVLEEKLEKEDFTRGKLMSSLHLKRYYGRILHYLKAKEYSHCAWTIVRVEILRNFYFINRLTGYLRN

SEQ ID NO: 382 - protein, 166 aa, Homo sapiens
MSYNLLGFLQRSSNFQCQKLLRQLNGRLEYCLKDRMNFDIPEEIKQLQQFQKEDAALTIYEMLQNIFAIFRQDSSSTGWNETIVENLLANVYHQINHLKTVLEEKLEKEDFTRGKLMSSLHLKRYYGRILHYLKAKEYSHCAWTIVRVEILRNFYFINRLTGYLRN

SEQ ID NO: 383 - protein, 166 aa, Homo sapiens
MSYNLLGFLQRSSNFQCQKLLWDLNGRLEYCLKDRMNFDIPEEIKQLQQFQKEDAALTIYEMLQNIFAIFRQDSSSTGWNETIVENLLANVYHQINHLKTVLEEKLEKEDFTRGKLMSSLHLKRYYGRILHYLKAKEYSHCAWTIVRVEILRNFYFINRLTGYLRN

SEQ ID NO: 384 - protein, 166 aa, Homo sapiens
MSYNLLGFLQRSSNFQCQKLLWELNGRLEYCLKDRMNFDIPEEIKQLQQFQKEDAALTIYEMLQNIFAIFRQDSSSTGWNETIVENLLANVYHQINHLKTVLEEKLEKEDFTRGKLMSSLHLKRYYGRILHYLKAKEYSHCAWTIVRVEILRNFYFINRLTGYLRN

SEQ ID NO: 385 - protein, 166 aa, Homo sapiens
MSYNLLGFLQRSSNFQCQKLLWKLNGRLEYCLKDRMNFDIPEEIKQLQQFQKEDAALTIYEMLQNIFAIFRQDSSSTGWNETIVENLLANVYHQINHLKTVLEEKLEKEDFTRGKLMSSLHLKRYYGRILHYLKAKEYSHCAWTIVRVEILRNFYFINRLTGYLRN

SEQ ID NO: 386 - protein, 166 aa, Homo sapiens
MSYNLLGFLQRSSNFQCQKLLWRLNGRLEYCLKDRMNFDIPEEIKQLQQFQKEDAALTIYEMLQNIFAIFRQDSSSTGWNETIVENLLANVYHQINHLKTVLEEKLEKEDFTRGKLMSSLHLKRYYGRILHYLKAKEYSHCAWTIVRVEILRNFYFINRLTGYLRN

SEQ ID NO: 387 - protein, 166 aa, Homo sapiens
MSYNLLGFLQRSSNFQCQKLLWQDNGRLEYCLKDRMNFDIPEEIKQLQQFQKEDAALTIYEMLQNIFAIFRQDSSSTGWNETIVENLLANVYHQINHLKTVLEEKLEKEDFTRGKLMSSLHLKRYYGRILHYLKAKEYSHCAWTIVRVEILRNFYFINRLTGYLRN

SEQ ID NO: 388 - protein, 166 aa, Homo sapiens
MSYNLLGFLQRSSNFQCQKLLWQENGRLEYCLKDRMNFDIPEEIKQLQQFQKEDAALTIYEMLQNIFAIFRQDSSSTGWNETIVENLLANVYHQINHLKTVLEEKLEKEDFTRGKLMSSLHLKRYYGRILHYLKAKEYSHCAWTIVRVEILRNFYFINRLTGYLRN

SEQ ID NO: 389 - protein, 166 aa, Homo sapiens
MSYNLLGFLQRSSNFQCQKLLWQKNGRLEYCLKDRMNFDIPEEIKQLQQFQKEDAALTIYEMLQNIFAIFRQDSSSTGWNETIVENLLANVYHQINHLKTVLEEKLEKEDFTRGKLMSSLHLKRYYGRILHYLKAKEYSHCAWTIVRVEILRNFYFINRLTGYLRN

SEQ ID NO: 390 - protein, 166 aa, Homo sapiens
MSYNLLGFLQRSSNFQCQKLLWQRNGRLEYCLKDRMNFDIPEEIKQLQQFQKEDAALTIYEMLQNIFAIFRQDSSSTGWNETIVENLLANVYHQINHLKTVLEEKLEKEDFTRGKLMSSLHLKRYYGRILHYLKAKEYSHCAWTIVRVEILRNFYFINRLTGYLRN

SEQ ID NO: 391 - protein, 166 aa, Homo sapiens
MSYNLLGFLQRSSNFQCQKLLWQLNGRLEYCLKDRMNFDIPEEIKQLQQFQKEDAALTIYEMLQNIFAIFRQDSSSTDWNETIVENLLANVYHQINHLKTVLEEKLEKEDFTRGKLMSSLHLKRYYGRILHYLKAKEYSHCAWTIVRVEILRNFYFINRLTGYLRN

SEQ ID NO: 392 - protein, 166 aa, Homo sapiens
MSYNLLGFLQRSSNFQCQKLLWQLNGRLEYCLKDRMNFDIPEEIKQLQQFQKEDAALTIYEMLQNIFAIFRQDSSSTEWNETIVENLLANVYHQINHLKTVLEEKLEKEDFTRGKLMSSLHLKRYYGRILHYLKAKEYSHCAWTIVRVEILRNFYFINRLTGYLRN

SEQ ID NO: 393 - protein, 166 aa, Homo sapiens
MSYNLLGFLQRSSNFQCQKLLWQLNGRLEYCLKDRMNFDIPEEIKQLQQFQKEDAALTIYEMLQNIFAIFRQDSSSTKWNETIVENLLANVYHQINHLKTVLEEKLEKEDFTRGKLMSSLHLKRYYGRILHYLKAKEYSHCAWTIVRVEILRNFYFINRLTGYLRN

SEQ ID NO: 394 - protein, 166 aa, Homo sapiens
MSYNLLGFLQRSSNFQCQKLLWQLNGRLEYCLKDRMNFDIPEEIKQLQQFQKEDAALTIYEMLQNIFAIFRQDSSSTRWNETIVENLLANVYHQINHLKTVLEEKLEKEDFTRGKLMSSLHLKRYYGRILHYLKAKEYSHCAWTIVRVEILRNFYFINRLTGYLRN

SEQ ID NO: 395 - protein, 166 aa, Homo sapiens
MSYNLLGFLQRSSNFQCQKLLWQLNGRLEYCLKDRMNFDIPEEIKQLQQFQKEDAALTIYEMLQNIFAIFRQDSSSTGDNETIVENLLANVYHQINHLKTVLEEKLEKEDFTRGKLMSSLHLKRYYGRILHYLKAKEYSHCAWTIVRVEILRNFYFINRLTGYLRN

SEQ ID NO: 396 - protein, 166 aa, Homo sapiens
MSYNLLGFLQRSSNFQCQKLLWQLNGRLEYCLKDRMNFDIPEEIKQLQQFQKEDAALTIYEMLQNIFAIFRQDSSSTGENETIVENLLANVYHQINHLKTVLEEKLEKEDFTRGKLMSSLHLKRYYGRILHYLKAKEYSHCAWTIVRVEILRNFYFINRLTGYLRN

SEQ ID NO: 397 - protein, 166 aa, Homo sapiens
MSYNLLGFLQRSSNFQCQKLLWQLNGRLEYCLKDRMNFDIPEEIKQLQQFQKEDAALTIYEMLQNIFAIFRQDSSSTGKNETIVENLLANVYHQINHLKTVLEEKLEKEDFTRGKLMSSLHLKRYYGRILHYLKAKEYSHCAWTIVRVEILRNFYFINRLTGYLRN

SEQ ID NO: 398 - protein, 166 aa, Homo sapiens
MSYNLLGFLQRSSNFQCQKLLWQLNGRLEYCLKDRMNFDIPEEIKQLQQFQKEDAALTIYEMLQNIFAIFRQDSSSTGRNETIVENLLANVYHQINHLKTVLEEKLEKEDFTRGKLMSSLHLKRYYGRILHYLKAKEYSHCAWTIVRVEILRNFYFINRLTGYLRN

SEQ ID NO: 399 - protein, 166 aa, Homo sapiens
MSYNLLGFLQRSSNFQCQKLLWQLNGRLEYCLKDRMNFDIPEEIKQLQQFQKEDAALTIYEMLQNIFAIFRQDSSSTGWDETIVENLLANVYHQINHLKTVLEEKLEKEDFTRGKLMSSLHLKRYYGRILHYLKAKEYSHCAWTIVRVEILRNFYFINRLTGYLRN

SEQ ID NO: 400 - protein, 166 aa, Homo sapiens
MSYNLLGFLQRSSNFQCQKLLWQLNGRLEYCLKDRMNFDIPEEIKQLQQFQKEDAALTIYEMLQNIFAIFRQDSSSTGWEETIVENLLANVYHQINHLKTVLEEKLEKEDFTRGKLMSSLHLKRYYGRILHYLKAKEYSHCAWTIVRVEILRNFYFINRLTGYLRN

SEQ ID NO: 401 - protein, 166 aa, Homo sapiens
MSYNLLGFLQRSSNFQCQKLLWQLNGRLEYCLKDRMNFDIPEEIKQLQQFQKEDAALTIYEMLQNIFAIFRQDSSSTGWKETIVENLLANVYHQINHLKTVLEEKLEKEDFTRGKLMSSLHLKRYYGRILHYLKAKEYSHCAWTIVRVEILRNFYFINRLTGYLRN

SEQ ID NO: 402 - protein, 166 aa, Homo sapiens
MSYNLLGFLQRSSNFQCQKLLWQLNGRLEYCLKDRMNFDIPEEIKQLQQFQKEDAALTIYEMLQNIFAIFRQDSSSTGWRETIVENLLANVYHQINHLKTVLEEKLEKEDFTRGKLMSSLHLKRYYGRILHYLKAKEYSHCAWTIVRVEILRNFYFINRLTGYLRN

SEQ ID NO: 403 - protein, 166 aa, Homo sapiens
MSYNLLGFLQRSSNFQCQKLLWQLNGRLEYCLKDRMNFDIPEEIKQLQQFQKEDAALTIYEMLQNIFAIFRQDSSSTGWNEDIVENLLANVYHQINHLKTVLEEKLEKEDFTRGKLMSSLHLKRYYGRILHYLKAKEYSHCAWTIVRVEILRNFYFINRLTGYLRN

SEQ ID NO: 404 - protein, 166 aa, Homo sapiens
MSYNLLGFLQRSSNFQCQKLLWQLNGRLEYCLKDRMNFDIPEEIKQLQQFQKEDAALTIYEMLQNIFAIFRQDSSSTGWNEEIVENLLANVYHQINHLKTVLEEKLEKEDFTRGKLMSSLHLKRYYGRILHYLKAKEYSHCAWTIVRVEILRNFYFINRLTGYLRN

SEQ ID NO: 405 - protein, 166 aa, Homo sapiens
MSYNLLGFLQRSSNFQCQKLLWQLNGRLEYCLKDRMNFDIPEEIKQLQQFQKEDAALTIYEMLQNIFAIFRQDSSSTGWNEKIVENLLANVYHQINHLKTVLEEKLEKEDFTRGKLMSSLHLKRYYGRILHYLKAKEYSHCAWTIVRVEILRNFYFINRLTGYLRN

SEQ ID NO: 406 - protein, 166 aa, Homo sapiens
MSYNLLGFLQRSSNFQCQKLLWQLNGRLEYCLKDRMNFDIPEEIKQLQQFQKEDAALTIYEMLQNIFAIFRQDSSSTGWNERIVENLLANVYHQINHLKTVLEEKLEKEDFTRGKLMSSLHLKRYYGRILHYLKAKEYSHCAWTIVRVEILRNFYFINRLTGYLRN

SEQ ID NO: 407 - protein, 166 aa, Homo sapiens
MSYNLLGFLQRSSNFQCQKLLWQLNGRLEYCLKDRMNFDIPEEIKQLQQFQKEDAALTIYEMLQNIFAIFRQDSSSTGWNETDVENLLANVYHQINHLKTVLEEKLEKEDFTRGKLMSSLHLKRYYGRILHYLKAKEYSHCAWTIVRVEILRNFYFINRLTGYLRN

SEQ ID NO: 408 - protein, 166 aa, Homo sapiens
MSYNLLGFLQRSSNFQCQKLLWQLNGRLEYCLKDRMNFDIPEEIKQLQQFQKEDAALTIYEMLQNIFAIFRQDSSSTGWNETEVENLLANVYHQINHLKTVLEEKLEKEDFTRGKLMSSLHLKRYYGRILHYLKAKEYSHCAWTIVRVEILRNFYFINRLTGYLRN

SEQ ID NO: 409 - protein, 166 aa, Homo sapiens
MSYNLLGFLQRSSNFQCQKLLWQLNGRLEYCLKDRMNFDIPEEIKQLQQFQKEDAALTIYEMLQNIFAIFRQDSSSTGWNETKVENLLANVYHQINHLKTVLEEKLEKEDFTRGKLMSSLHLKRYYGRILHYLKAKEYSHCAWTIVRVEILRNFYFINRLTGYLRN

SEQ ID NO: 410 - protein, 166 aa, Homo sapiens
MSYNLLGFLQRSSNFQCQKLLWQLNGRLEYCLKDRMNFDIPEEIKQLQQFQKEDAALTIYEMLQNIFAIFRQDSSSTGWNETRVENLLANVYHQINHLKTVLEEKLEKEDFTRGKLMSSLHLKRYYGRILHYLKAKEYSHCAWTIVRVEILRNFYFINRLTGYLRN

SEQ ID NO: 411 - protein, 166 aa, Homo sapiens
MSYNLLGFLQRSSNFQCQKLLWQLNGRLEYCLKDRMNFDIPEEIKQLQQFQKEDAALTIYEMLQNIFAIFRQDSSSTGWNETNVENLLANVYHQINHLKTVLEEKLEKEDFTRGKLMSSLHLKRYYGRILHYLKAKEYSHCAWTIVRVEILRNFYFINRLTGYLRN

SEQ ID NO: 412 - protein, 166 aa, Homo sapiens
MSYNLLGFLQRSSNFQCQKLLWQLNGRLEYCLKDRMNFDIPEEIKQLQQFQKEDAALTIYEMLQNIFAIFRQDSSSTGWNETQVENLLANVYHQINHLKTVLEEKLEKEDFTRGKLMSSLHLKRYYGRILHYLKAKEYSHCAWTIVRVEILRNFYFINRLTGYLRN

SEQ ID NO: 413 - protein, 166 aa, Homo sapiens
MSYNLLGFLQRSSNFQCQKLLWQLNGRLEYCLKDRMNFDIPEEIKQLQQFQKEDAALTIYEMLQNIFAIFRQDSSSTGWNETSVENLLANVYHQINHLKTVLEEKLEKEDFTRGKLMSSLHLKRYYGRILHYLKAKEYSHCAWTIVRVEILRNFYFINRLTGYLRN

SEQ ID NO: 414 - protein, 166 aa, Homo sapiens
MSYNLLGFLQRSSNFQCQKLLWQLNGRLEYCLKDRMNFDIPEEIKQLQQFQKEDAALTIYEMLQNIFAIFRQDSSSTGWNETTVENLLANVYHQINHLKTVLEEKLEKEDFTRGKLMSSLHLKRYYGRILHYLKAKEYSHCAWTIVRVEILRNFYFINRLTGYLRN

SEQ ID NO: 415 - protein, 166 aa, Homo sapiens
MSYNLLGFLQRSSNFQCQKLLWQLNGRLEYCLKDRMNFDIPEEIKQLQQFQKEDAALTIYEMLQNIFAIFRQDSSSTGWNETIVEDLLANVYHQINHLKTVLEEKLEKEDFTRGKLMSSLHLKRYYGRILHYLKAKEYSHCAWTIVRVEILRNFYFINRLTGYLRN

SEQ ID NO: 416 - protein, 166 aa, Homo sapiens
MSYNLLGFLQRSSNFQCQKLLWQLNGRLEYCLKDRMNFDIPEEIKQLQQFQKEDAALTIYEMLQNIFAIFRQDSSSTGWNETIVEELLANVYHQINHLKTVLEEKLEKEDFTRGKLMSSLHLKRYYGRILHYLKAKEYSHCAWTIVRVEILRNFYFINRLTGYLRN

SEQ ID NO: 417 - protein, 166 aa, Homo sapiens
MSYNLLGFLQRSSNFQCQKLLWQLNGRLEYCLKDRMNFDIPEEIKQLQQFQKEDAALTIYEMLQNIFAIFRQDSSSTGWNETIVEKLLANVYHQINHLKTVLEEKLEKEDFTRGKLMSSLHLKRYYGRILHYLKAKEYSHCAWTIVRVEILRNFYFINRLTGYLRN

SEQ ID NO: 418 - protein, 166 aa, Homo sapiens
MSYNLLGFLQRSSNFQCQKLLWQLNGRLEYCLKDRMNFDIPEEIKQLQQFQKEDAALTIYEMLQNIFAIFRQDSSSTGWNETIVERLLANVYHQINHLKTVLEEKLEKEDFTRGKLMSSLHLKRYYGRILHYLKAKEYSHCAWTIVRVEILRNFYFINRLTGYLRN

SEQ ID NO: 419 - protein, 166 aa, Homo sapiens
MSYNLLGFLQRSSNFQCQKLLWQLNGRLEYCLKDRMNFDIPEEIKQLQQFQKEDAALTIYEMLQNIFAIFRQDSSSTGWNETIVEQLLANVYHQINHLKTVLEEKLEKEDFTRGKLMSSLHLKRYYGRILHYLKAKEYSHCAWTIVRVEILRNFYFINRLTGYLRN

SEQ ID NO: 420 - protein, 166 aa, Homo sapiens
MSYNLLGFLQRSSNFQCQKLLWQLNGRLEYCLKDRMNFDIPEEIKQLQQFQKEDAALTIYEMLQNIFAIFRQDSSSTGWNETIVESLLANVYHQINHLKTVLEEKLEKEDFTRGKLMSSLHLKRYYGRILHYLKAKEYSHCAWTIVRVEILRNFYFINRLTGYLRN

SEQ ID NO: 421 - protein, 166 aa, Homo sapiens
MSYNLLGFLQRSSNFQCQKLLWQLNGRLEYCLKDRMNFDIPEEIKQLQQFQKEDAALTIYEMLQNIFAIFRQDSSSTGWNETIVETLLANVYHQINHLKTVLEEKLEKEDFTRGKLMSSLHLKRYYGRILHYLKAKEYSHCAWTIVRVEILRNFYFINRLTGYLRN

SEQ ID NO: 422 - protein, 166 aa, Homo sapiens
MSYNLLGFLQRSSNFQCQKLLWQLNGRLEYCLKDRMNFDIPEEIKQLQQFQKEDAALTIYEMLQNIFAIFRQDSSSTGWNETIVENDLANVYHQINHLKTVLEEKLEKEDFTRGKLMSSLHLKRYYGRILHYLKAKEYSHCAWTIVRVEILRNFYFINRLTGYLRN

SEQ ID NO: 423 - protein, 166 aa, Homo sapiens
MSYNLLGFLQRSSNFQCQKLLWQLNGRLEYCLKDRMNFDIPEEIKQLQQFQKEDAALTIYEMLQNIFAIFRQDSSSTGWNETIVENELANVYHQINHLKTVLEEKLEKEDFTRGKLMSSLHLKRYYGRILHYLKAKEYSHCAWTIVRVEILRNFYFINRLTGYLRN

SEQ ID NO: 424 - protein, 166 aa, Homo sapiens
MSYNLLGFLQRSSNFQCQKLLWQLNGRLEYCLKDRMNFDIPEEIKQLQQFQKEDAALTIYEMLQNIFAIFRQDSSSTGWNETIVENKLANVYHQINHLKTVLEEKLEKEDFTRGKLMSSLHLKRYYGRILHYLKAKEYSHCAWTIVRVEILRNFYFINRLTGYLRN

SEQ ID NO: 425 - protein, 166 aa, Homo sapiens
MSYNLLGFLQRSSNFQCQKLLWQLNGRLEYCLKDRMNFDIPEEIKQLQQFQKEDAALTIYEMLQNIFAIFRQDSSSTGWNETIVENRLANVYHQINHLKTVLEEKLEKEDFTRGKLMSSLHLKRYYGRILHYLKAKEYSHCAWTIVRVEILRNFYFINRLTGYLRN

SEQ ID NO: 426 - protein, 166 aa, Homo sapiens
MSYNLLGFLQRSSNFQCQKLLWQLNGRLEYCLKDRMNFDIPEEIKQLQQFQKEDAALTIYEMLQNIFAIFRQDSSSTGWNETIVENNLANVYHQINHLKTVLEEKLEKEDFTRGKLMSSLHLKRYYGRILHYLKAKEYSHCAWTIVRVEILRNFYFINRLTGYLRN

SEQ ID NO: 427 - protein, 166 aa, Homo sapiens
MSYNLLGFLQRSSNFQCQKLLWQLNGRLEYCLKDRMNFDIPEEIKQLQQFQKEDAALTIYEMLQNIFAIFRQDSSSTGWNETIVENQLANVYHQINHLKTVLEEKLEKEDFTRGKLMSSLHLKRYYGRILHYLKAKEYSHCAWTIVRVEILRNFYFINRLTGYLRN

SEQ ID NO: 428 - protein, 166 aa, Homo sapiens
MSYNLLGFLQRSSNFQCQKLLWQLNGRLEYCLKDRMNFDIPEEIKQLQQFQKEDAALTIYEMLQNIFAIFRQDSSSTGWNETIVENSLANVYHQINHLKTVLEEKLEKEDFTRGKLMSSLHLKRYYGRILHYLKAKEYSHCAWTIVRVEILRNFYFINRLTGYLRN

SEQ ID NO: 429 - protein, 166 aa, Homo sapiens
MSYNLLGFLQRSSNFQCQKLLWQLNGRLEYCLKDRMNFDIPEEIKQLQQFQKEDAALTIYEMLQNIFAIFRQDSSSTGWNETIVENTLANVYHQINHLKTVLEEKLEKEDFTRGKLMSSLHLKRYYGRILHYLKAKEYSHCAWTIVRVEILRNFYFINRLTGYLRN

SEQ ID NO: 430 - protein, 166 aa, Homo sapiens
MSYNLLGFLQRSSNFQCQKLLWQLNGRLEYCLKDRMNFDIPEEIKQLQQFQKEDAALTIYEMLQNIFAIFRQDSSSTGWNETIVENLLDNVYHQINHLKTVLEEKLEKEDFTRGKLMSSLHLKRYYGRILHYLKAKEYSHCAWTIVRVEILRNFYFINRLTGYLRN

SEQ ID NO: 431 - protein, 166 aa, Homo sapiens
MSYNLLGFLQRSSNFQCQKLLWQLNGRLEYCLKDRMNFDIPEEIKQLQQFQKEDAALTIYEMLQNIFAIFRQDSSSTGWNETIVENLLENVYHQINHLKTVLEEKLEKEDFTRGKLMSSLHLKRYYGRILHYLKAKEYSHCAWTIVRVEILRNFYFINRLTGYLRN

SEQ ID NO: 432 - protein, 166 aa, Homo sapiens
MSYNLLGFLQRSSNFQCQKLLWQLNGRLEYCLKDRMNFDIPEEIKQLQQFQKEDAALTIYEMLQNIFAIFRQDSSSTGWNETIVENLLKNVYHQINHLKTVLEEKLEKEDFTRGKLMSSLHLKRYYGRILHYLKAKEYSHCAWTIVRVEILRNFYFINRLTGYLRN

SEQ ID NO: 433 - protein, 166 aa, Homo sapiens
MSYNLLGFLQRSSNFQCQKLLWQLNGRLEYCLKDRMNFDIPEEIKQLQQFQKEDAALTIYEMLQNIFAIFRQDSSSTGWNETIVENLLRNVYHQINHLKTVLEEKLEKEDFTRGKLMSSLHLKRYYGRILHYLKAKEYSHCAWTIVRVEILRNFYFINRLTGYLRN

SEQ ID NO: 434 - protein, 166 aa, Homo sapiens
MSYNLLGFLQRSSNFQCQKLLWQLNGRLEYCLKDRMNFDIPEEIKQLQQFQKEDAALTIYEMLQNIFAIFRQDSSSTGWNETIVENLLADVYHQINHLKTVLEEKLEKEDFTRGKLMSSLHLKRYYGRILHYLKAKEYSHCAWTIVRVEILRNFYFINRLTGYLRN

SEQ ID NO: 435 - protein, 166 aa, Homo sapiens
MSYNLLGFLQRSSNFQCQKLLWQLNGRLEYCLKDRMNFDIPEEIKQLQQFQKEDAALTIYEMLQNIFAIFRQDSSSTGWNETIVENLLAEVYHQINHLKTVLEEKLEKEDFTRGKLMSSLHLKRYYGRILHYLKAKEYSHCAWTIVRVEILRNFYFINRLTGYLRN

SEQ ID NO: 436 - protein, 166 aa, Homo sapiens
MSYNLLGFLQRSSNFQCQKLLWQLNGRLEYCLKDRMNFDIPEEIKQLQQFQKEDAALTIYEMLQNIFAIFRQDSSSTGWNETIVENLLAKVYHQINHLKTVLEEKLEKEDFTRGKLMSSLHLKRYYGRILHYLKAKEYSHCAWTIVRVEILRNFYFINRLTGYLRN

SEQ ID NO: 437 - protein, 166 aa, Homo sapiens
MSYNLLGFLQRSSNFQCQKLLWQLNGRLEYCLKDRMNFDIPEEIKQLQQFQKEDAALTIYEMLQNIFAIFRQDSSSTGWNETIVENLLAQVYHQINHLKTVLEEKLEKEDFTRGKLMSSLHLKRYYGRILHYLKAKEYSHCAWTIVRVEILRNFYFINRLTGYLRN

SEQ ID NO: 438 - protein, 166 aa, Homo sapiens
MSYNLLGFLQRSSNFQCQKLLWQLNGRLEYCLKDRMNFDIPEEIKQLQQFQKEDAALTIYEMLQNIFAIFRQDSSSTGWNETIVENLLARVYHQINHLKTVLEEKLEKEDFTRGKLMSSLHLKRYYGRILHYLKAKEYSHCAWTIVRVEILRNFYFINRLTGYLRN

SEQ ID NO: 439 - protein, 166 aa, Homo sapiens
MSYNLLGFLQRSSNFQCQKLLWQLNGRLEYCLKDRMNFDIPEEIKQLQQFQKEDAALTIYEMLQNIFAIFRQDSSSTGWNETIVENLLASVYHQINHLKTVLEEKLEKEDFTRGKLMSSLHLKRYYGRILHYLKAKEYSHCAWTIVRVEILRNFYFINRLTGYLRN

SEQ ID NO: 440 - protein, 166 aa, Homo sapiens
MSYNLLGFLQRSSNFQCQKLLWQLNGRLEYCLKDRMNFDIPEEIKQLQQFQKEDAALTIYEMLQNIFAIFRQDSSSTGWNETIVENLLATVYHQINHLKTVLEEKLEKEDFTRGKLMSSLHLKRYYGRILHYLKAKEYSHCAWTIVRVEILRNFYFINRLTGYLRN

SEQ ID NO: 441 - protein, 166 aa, Homo sapiens
MSYNLLGFLQRSSNFQCQKLLWQLNGRLEYCLKDRMNFDIPEEIKQLQQFQKEDAALTIYEMLQNIFAIFRQDSSSTGWNETIVENLLANDYHQINHLKTVLEEKLEKEDFTRGKLMSSLHLKRYYGRILHYLKAKEYSHCAWTIVRVEILRNFYFINRLTGYLRN

SEQ ID NO: 442 - protein, 166 aa, Homo sapiens
MSYNLLGFLQRSSNFQCQKLLWQLNGRLEYCLKDRMNFDIPEEIKQLQQFQKEDAALTIYEMLQNIFAIFRQDSSSTGWNETIVENLLANEYHQINHLKTVLEEKLEKEDFTRGKLMSSLHLKRYYGRILHYLKAKEYSHCAWTIVRVEILRNFYFINRLTGYLRN

SEQ ID NO: 443 - protein, 166 aa, Homo sapiens
MSYNLLGFLQRSSNFQCQKLLWQLNGRLEYCLKDRMNFDIPEEIKQLQQFQKEDAALTIYEMLQNIFAIFRQDSSSTGWNETIVENLLANKYHQINHLKTVLEEKLEKEDFTRGKLMSSLHLKRYYGRILHYLKAKEYSHCAWTIVRVEILRNFYFINRLTGYLRN

SEQ ID NO: 444 - protein, 166 aa, Homo sapiens
MSYNLLGFLQRSSNFQCQKLLWQLNGRLEYCLKDRMNFDIPEEIKQLQQFQKEDAALTIYEMLQNIFAIFRQDSSSTGWNETIVENLLANNYHQINHLKTVLEEKLEKEDFTRGKLMSSLHLKRYYGRILHYLKAKEYSHCAWTIVRVEILRNFYFINRLTGYLRN

SEQ ID NO: 445 - protein, 166 aa, Homo sapiens
MSYNLLGFLQRSSNFQCQKLLWQLNGRLEYCLKDRMNFDIPEEIKQLQQFQKEDAALTIYEMLQNIFAIFRQDSSSTGWNETIVENLLANQYHQINHLKTVLEEKLEKEDFTRGKLMSSLHLKRYYGRILHYLKAKEYSHCAWTIVRVEILRNFYFINRLTGYLRN

SEQ ID NO: 446 - protein, 166 aa, Homo sapiens
MSYNLLGFLQRSSNFQCQKLLWQLNGRLEYCLKDRMNFDIPEEIKQLQQFQKEDAALTIYEMLQNIFAIFRQDSSSTGWNETIVENLLANRYHQINHLKTVLEEKLEKEDFTRGKLMSSLHLKRYYGRILHYLKAKEYSHCAWTIVRVEILRNFYFINRLTGYLRN

SEQ ID NO: 447 - protein, 166 aa, Homo sapiens
MSYNLLGFLQRSSNFQCQKLLWQLNGRLEYCLKDRMNFDIPEEIKQLQQFQKEDAALTIYEMLQNIFAIFRQDSSSTGWNETIVENLLANSYHQINHLKTVLEEKLEKEDFTRGKLMSSLHLKRYYGRILHYLKAKEYSHCAWTIVRVEILRNFYFINRLTGYLRN

SEQ ID NO: 448 - protein, 166 aa, Homo sapiens
MSYNLLGFLQRSSNFQCQKLLWQLNGRLEYCLKDRMNFDIPEEIKQLQQFQKEDAALTIYEMLQNIFAIFRQDSSSTGWNETIVENLLANTYHQINHLKTVLEEKLEKEDFTRGKLMSSLHLKRYYGRILHYLKAKEYSHCAWTIVRVEILRNFYFINRLTGYLRN

SEQ ID NO: 449 - protein, 166 aa, Homo sapiens
MSYNLLGFLQRSSNFQCQKLLWQLNGRLEYCLKDRMNFDIPEEIKQLQQFQKEDAALTIYEMLQNIFAIFRQDSSSTGWNETIVENLLANVYHDINHLKTVLEEKLEKEDFTRGKLMSSLHLKRYYGRILHYLKAKEYSHCAWTIVRVEILRNFYFINRLTGYLRN

SEQ ID NO: 450 - protein, 166 aa, Homo sapiens
MSYNLLGFLQRSSNFQCQKLLWQLNGRLEYCLKDRMNFDIPEEIKQLQQFQKEDAALTIYEMLQNIFAIFRQDSSSTGWNETIVENLLANVYHEINHLKTVLEEKLEKEDFTRGKLMSSLHLKRYYGRILHYLKAKEYSHCAWTIVRVEILRNFYFINRLTGYLRN

SEQ ID NO: 451 - protein, 166 aa, Homo sapiens
MSYNLLGFLQRSSNFQCQKLLWQLNGRLEYCLKDRMNFDIPEEIKQLQQFQKEDAALTIYEMLQNIFAIFRQDSSSTGWNETIVENLLANVYHKINHLKTVLEEKLEKEDFTRGKLMSSLHLKRYYGRILHYLKAKEYSHCAWTIVRVEILRNFYFINRLTGYLRN

SEQ ID NO: 452 - protein, 166 aa, Homo sapiens
MSYNLLGFLQRSSNFQCQKLLWQLNGRLEYCLKDRMNFDIPEEIKQLQQFQKEDAALTIYEMLQNIFAIFRQDSSSTGWNETIVENLLANVYHNINHLKTVLEEKLEKEDFTRGKLMSSLHLKRYYGRILHYLKAKEYSHCAWTIVRVEILRNFYFINRLTGYLRN

SEQ ID NO: 453 - protein, 166 aa, Homo sapiens
MSYNLLGFLQRSSNFQCQKLLWQLNGRLEYCLKDRMNFDIPEEIKQLQQFQKEDAALTIYEMLQNIFAIFRQDSSSTGWNETIVENLLANVYHRINHLKTVLEEKLEKEDFTRGKLMSSLHLKRYYGRILHYLKAKEYSHCAWTIVRVEILRNFYFINRLTGYLRN

SEQ ID NO: 454 - protein, 166 aa, Homo sapiens
MSYNLLGFLQRSSNFQCQKLLWQLNGRLEYCLKDRMNFDIPEEIKQLQQFQKEDAALTIYEMLQNIFAIFRQDSSSTGWNETIVENLLANVYHSINHLKTVLEEKLEKEDFTRGKLMSSLHLKRYYGRILHYLKAKEYSHCAWTIVRVEILRNFYFINRLTGYLRN

SEQ ID NO: 455 - protein, 166 aa, Homo sapiens
MSYNLLGFLQRSSNFQCQKLLWQLNGRLEYCLKDRMNFDIPEEIKQLQQFQKEDAALTIYEMLQNIFAIFRQDSSSTGWNETIVENLLANVYHTINHLKTVLEEKLEKEDFTRGKLMSSLHLKRYYGRILHYLKAKEYSHCAWTIVRVEILRNFYFINRLTGYLRN

SEQ ID NO: 456 - protein, 166 aa, Homo sapiens
MSYNLLGFLQRSSNFQCQKLLWQLNGRLEYCLKDRMNFDIPEEIKQLQQFQKEDAALTIYEMLQNIFAIFRQDSSSTGWNETIVENLLANVYHQDNHLKTVLEEKLEKEDFTRGKLMSSLHLKRYYGRILHYLKAKEYSHCAWTIVRVEILRNFYFINRLTGYLRN

SEQ ID NO: 457 - protein, 166 aa, Homo sapiens
MSYNLLGFLQRSSNFQCQKLLWQLNGRLEYCLKDRMNFDIPEEIKQLQQFQKEDAALTIYEMLQNIFAIFRQDSSSTGWNETIVENLLANVYHQENHLKTVLEEKLEKEDFTRGKLMSSLHLKRYYGRILHYLKAKEYSHCAWTIVRVEILRNFYFINRLTGYLRN

SEQ ID NO: 458 - protein, 166 aa, Homo sapiens
MSYNLLGFLQRSSNFQCQKLLWQLNGRLEYCLKDRMNFDIPEEIKQLQQFQKEDAALTIYEMLQNIFAIFRQDSSSTGWNETIVENLLANVYHQKNHLKTVLEEKLEKEDFTRGKLMSSLHLKRYYGRILHYLKAKEYSHCAWTIVRVEILRNFYFINRLTGYLRN

SEQ ID NO: 459 - protein, 166 aa, Homo sapiens
MSYNLLGFLQRSSNFQCQKLLWQLNGRLEYCLKDRMNFDIPEEIKQLQQFQKEDAALTIYEMLQNIFAIFRQDSSSTGWNETIVENLLANVYHQNNHLKTVLEEKLEKEDFTRGKLMSSLHLKRYYGRILHYLKAKEYSHCAWTIVRVEILRNFYFINRLTGYLRN

SEQ ID NO: 460 - protein, 166 aa, Homo sapiens
MSYNLLGFLQRSSNFQCQKLLWQLNGRLEYCLKDRMNFDIPEEIKQLQQFQKEDAALTIYEMLQNIFAIFRQDSSSTGWNETIVENLLANVYHQQNHLKTVLEEKLEKEDFTRGKLMSSLHLKRYYGRILHYLKAKEYSHCAWTIVRVEILRNFYFINRLTGYLRN

SEQ ID NO: 461 - protein, 166 aa, Homo sapiens
MSYNLLGFLQRSSNFQCQKLLWQLNGRLEYCLKDRMNFDIPEEIKQLQQFQKEDAALTIYEMLQNIFAIFRQDSSSTGWNETIVENLLANVYHQRNHLKTVLEEKLEKEDFTRGKLMSSLHLKRYYGRILHYLKAKEYSHCAWTIVRVEILRNFYFINRLTGYLRN

SEQ ID NO: 462 - protein, 166 aa, Homo sapiens
MSYNLLGFLQRSSNFQCQKLLWQLNGRLEYCLKDRMNFDIPEEIKQLQQFQKEDAALTIYEMLQNIFAIFRQDSSSTGWNETIVENLLANVYHQSNHLKTVLEEKLEKEDFTRGKLMSSLHLKRYYGRILHYLKAKEYSHCAWTIVRVEILRNFYFINRLTGYLRN

SEQ ID NO: 463 - protein, 166 aa, Homo sapiens
MSYNLLGFLQRSSNFQCQKLLWQLNGRLEYCLKDRMNFDIPEEIKQLQQFQKEDAALTIYEMLQNIFAIFRQDSSSTGWNETIVENLLANVYHQTNHLKTVLEEKLEKEDFTRGKLMSSLHLKRYYGRILHYLKAKEYSHCAWTIVRVEILRNFYFINRLTGYLRN

SEQ ID NO: 464 - protein, 166 aa, Homo sapiens
MSYNLLGFLQRSSNFQCQKLLWQLNGRLEYCLKDRMNFDIPEEIKQLQQFQKEDAALTIYEMLQNIFAIFRQDSSSTGWNETIVENLLANVYHQINDLKTVLEEKLEKEDFTRGKLMSSLHLKRYYGRILHYLKAKEYSHCAWTIVRVEILRNFYFINRLTGYLRN

SEQ ID NO: 465 - protein, 166 aa, Homo sapiens
MSYNLLGFLQRSSNFQCQKLLWQLNGRLEYCLKDRMNFDIPEEIKQLQQFQKEDAALTIYEMLQNIFAIFRQDSSSTGWNETIVENLLANVYHQINELKTVLEEKLEKEDFTRGKLMSSLHLKRYYGRILHYLKAKEYSHCAWTIVRVEILRNFYFINRLTGYLRN

SEQ ID NO: 466 - protein, 166 aa, Homo sapiens
MSYNLLGFLQRSSNFQCQKLLWQLNGRLEYCLKDRMNFDIPEEIKQLQQFQKEDAALTIYEMLQNIFAIFRQDSSSTGWNETIVENLLANVYHQINKLKTVLEEKLEKEDFTRGKLMSSLHLKRYYGRILHYLKAKEYSHCAWTIVRVEILRNFYFINRLTGYLRN

SEQ ID NO: 467 - protein, 166 aa, Homo sapiens
MSYNLLGFLQRSSNFQCQKLLWQLNGRLEYCLKDRMNFDIPEEIKQLQQFQKEDAALTIYEMLQNIFAIFRQDSSSTGWNETIVENLLANVYHQINNLKTVLEEKLEKEDFTRGKLMSSLHLKRYYGRILHYLKAKEYSHCAWTIVRVEILRNFYFINRLTGYLRN

SEQ ID NO: 468 - protein, 166 aa, Homo sapiens
MSYNLLGFLQRSSNFQCQKLLWQLNGRLEYCLKDRMNFDIPEEIKQLQQFQKEDAALTIYEMLQNIFAIFRQDSSSTGWNETIVENLLANVYHQINQLKTVLEEKLEKEDFTRGKLMSSLHLKRYYGRILHYLKAKEYSHCAWTIVRVEILRNFYFINRLTGYLRN

SEQ ID NO: 469 - protein, 166 aa, Homo sapiens
MSYNLLGFLQRSSNFQCQKLLWQLNGRLEYCLKDRMNFDIPEEIKQLQQFQKEDAALTIYEMLQNIFAIFRQDSSSTGWNETIVENLLANVYHQINRLKTVLEEKLEKEDFTRGKLMSSLHLKRYYGRILHYLKAKEYSHCAWTIVRVEILRNFYFINRLTGYLRN

SEQ ID NO: 470 - protein, 166 aa, Homo sapiens
MSYNLLGFLQRSSNFQCQKLLWQLNGRLEYCLKDRMNFDIPEEIKQLQQFQKEDAALTIYEMLQNIFAIFRQDSSSTGWNETIVENLLANVYHQINSLKTVLEEKLEKEDFTRGKLMSSLHLKRYYGRILHYLKAKEYSHCAWTIVRVEILRNFYFINRLTGYLRN

SEQ ID NO: 471 - protein, 166 aa, Homo sapiens
MSYNLLGFLQRSSNFQCQKLLWQLNGRLEYCLKDRMNFDIPEEIKQLQQFQKEDAALTIYEMLQNIFAIFRQDSSSTGWNETIVENLLANVYHQINTLKTVLEEKLEKEDFTRGKLMSSLHLKRYYGRILHYLKAKEYSHCAWTIVRVEILRNFYFINRLTGYLRN

SEQ ID NO: 472 - protein, 166 aa, Homo sapiens
MSYNLLGFLQRSSNFQCQKLLWQLNGRLEYCLKDRMNFDIPEEIKQLQQFQKEDAALTIYEMLQNIFAIFRQDSSSTGWNETIVENLLANVYHQINHDKTVLEEKLEKEDFTRGKLMSSLHLKRYYGRILHYLKAKEYSHCAWTIVRVEILRNFYFINRLTGYLRN

SEQ ID NO: 473 - protein, 166 aa, Homo sapiens
MSYNLLGFLQRSSNFQCQKLLWQLNGRLEYCLKDRMNFDIPEEIKQLQQFQKEDAALTIYEMLQNIFAIFRQDSSSTGWNETIVENLLANVYHQINHEKTVLEEKLEKEDFTRGKLMSSLHLKRYYGRILHYLKAKEYSHCAWTIVRVEILRNFYFINRLTGYLRN

SEQ ID NO: 474 - protein, 166 aa, Homo sapiens
MSYNLLGFLQRSSNFQCQKLLWQLNGRLEYCLKDRMNFDIPEEIKQLQQFQKEDAALTIYEMLQNIFAIFRQDSSSTGWNETIVENLLANVYHQINHKKTVLEEKLEKEDFTRGKLMSSLHLKRYYGRILHYLKAKEYSHCAWTIVRVEILRNFYFINRLTGYLRN

SEQ ID NO: 475 - protein, 166 aa, Homo sapiens
MSYNLLGFLQRSSNFQCQKLLWQLNGRLEYCLKDRMNFDIPEEIKQLQQFQKEDAALTIYEMLQNIFAIFRQDSSSTGWNETIVENLLANVYHQINHNKTVLEEKLEKEDFTRGKLMSSLHLKRYYGRILHYLKAKEYSHCAWTIVRVEILRNFYFINRLTGYLRN

SEQ ID NO: 476 - protein, 166 aa, Homo sapiens
MSYNLLGFLQRSSNFQCQKLLWQLNGRLEYCLKDRMNFDIPEEIKQLQQFQKEDAALTIYEMLQNIFAIFRQDSSSTGWNETIVENLLANVYHQINHQKTVLEEKLEKEDFTRGKLMSSLHLKRYYGRILHYLKAKEYSHCAWTIVRVEILRNFYFINRLTGYLRN

SEQ ID NO: 477 - protein, 166 aa, Homo sapiens
MSYNLLGFLQRSSNFQCQKLLWQLNGRLEYCLKDRMNFDIPEEIKQLQQFQKEDAALTIYEMLQNIFAIFRQDSSSTGWNETIVENLLANVYHQINHRKTVLEEKLEKEDFTRGKLMSSLHLKRYYGRILHYLKAKEYSHCAWTIVRVEILRNFYFINRLTGYLRN

SEQ ID NO: 478 - protein, 166 aa, Homo sapiens
MSYNLLGFLQRSSNFQCQKLLWQLNGRLEYCLKDRMNFDIPEEIKQLQQFQKEDAALTIYEMLQNIFAIFRQDSSSTGWNETIVENLLANVYHQINHSKTVLEEKLEKEDFTRGKLMSSLHLKRYYGRILHYLKAKEYSHCAWTIVRVEILRNFYFINRLTGYLRN

SEQ ID NO: 479 - protein, 166 aa, Homo sapiens
MSYNLLGFLQRSSNFQCQKLLWQLNGRLEYCLKDRMNFDIPEEIKQLQQFQKEDAALTIYEMLQNIFAIFRQDSSSTGWNETIVENLLANVYHQINHTKTVLEEKLEKEDFTRGKLMSSLHLKRYYGRILHYLKAKEYSHCAWTIVRVEILRNFYFINRLTGYLRN

SEQ ID NO: 480 - protein, 166 aa, Homo sapiens
MSYNLLGFLQRSSNFQCQKLLWQLNGRLEYCLKDRMNFDIPEEIKQLQQFQKEDAALTIYEMLQNIFAIFRQDSSSTGWNETIVENLLANVYHQINHLKTDLEEKLEKEDFTRGKLMSSLHLKRYYGRILHYLKAKEYSHCAWTIVRVEILRNFYFINRLTGYLRN

SEQ ID NO: 481 - protein, 166 aa, Homo sapiens
MSYNLLGFLQRSSNFQCQKLLWQLNGRLEYCLKDRMNFDIPEEIKQLQQFQKEDAALTIYEMLQNIFAIFRQDSSSTGWNETIVENLLANVYHQINHLKTELEEKLEKEDFTRGKLMSSLHLKRYYGRILHYLKAKEYSHCAWTIVRVEILRNFYFINRLTGYLRN

SEQ ID NO: 482 - protein, 166 aa, Homo sapiens
MSYNLLGFLQRSSNFQCQKLLWQLNGRLEYCLKDRMNFDIPEEIKQLQQFQKEDAALTIYEMLQNIFAIFRQDSSSTGWNETIVENLLANVYHQINHLKTKLEEKLEKEDFTRGKLMSSLHLKRYYGRILHYLKAKEYSHCAWTIVRVEILRNFYFINRLTGYLRN

SEQ ID NO: 483 - protein, 166 aa, Homo sapiens
MSYNLLGFLQRSSNFQCQKLLWQLNGRLEYCLKDRMNFDIPEEIKQLQQFQKEDAALTIYEMLQNIFAIFRQDSSSTGWNETIVENLLANVYHQINHLKTNLEEKLEKEDFTRGKLMSSLHLKRYYGRILHYLKAKEYSHCAWTIVRVEILRNFYFINRLTGYLRN

SEQ ID NO: 484 - protein, 166 aa, Homo sapiens
MSYNLLGFLQRSSNFQCQKLLWQLNGRLEYCLKDRMNFDIPEEIKQLQQFQKEDAALTIYEMLQNIFAIFRQDSSSTGWNETIVENLLANVYHQINHLKTQLEEKLEKEDFTRGKLMSSLHLKRYYGRILHYLKAKEYSHCAWTIVRVEILRNFYFINRLTGYLRN

SEQ ID NO: 485 - protein, 166 aa, Homo sapiens
MSYNLLGFLQRSSNFQCQKLLWQLNGRLEYCLKDRMNFDIPEEIKQLQQFQKEDAALTIYEMLQNIFAIFRQDSSSTGWNETIVENLLANVYHQINHLKTRLEEKLEKEDFTRGKLMSSLHLKRYYGRILHYLKAKEYSHCAWTIVRVEILRNFYFINRLTGYLRN

SEQ ID NO: 486 - protein, 166 aa, Homo sapiens
MSYNLLGFLQRSSNFQCQKLLWQLNGRLEYCLKDRMNFDIPEEIKQLQQFQKEDAALTIYEMLQNIFAIFRQDSSSTGWNETIVENLLANVYHQINHLKTSLEEKLEKEDFTRGKLMSSLHLKRYYGRILHYLKAKEYSHCAWTIVRVEILRNFYFINRLTGYLRN

SEQ ID NO: 487 - protein, 166 aa, Homo sapiens
MSYNLLGFLQRSSNFQCQKLLWQLNGRLEYCLKDRMNFDIPEEIKQLQQFQKEDAALTIYEMLQNIFAIFRQDSSSTGWNETIVENLLANVYHQINHLKTTLEEKLEKEDFTRGKLMSSLHLKRYYGRILHYLKAKEYSHCAWTIVRVEILRNFYFINRLTGYLRN

SEQ ID NO: 488 - protein, 166 aa, Homo sapiens
CSYNLLGFLQRSSNFQCQKLLWQLNGRLEYCLKDRMNFDIPEEIKQLQQFQKEDAALTIYEMLQNIFAIFRQDSSSTGWNETIVENLLANVYHQINHLKTVLEEKLEKEDFTRGKLMSSLHLKRYYGRILHYLKAKEYSHCAWTIVRVEILRNFYFINRLTGYLRN

SEQ ID NO: 489 - protein, 166 aa, Homo sapiens
MSYNLLGFLQRSSNFQCQKLLWQLNGRLEYCLKDRMNFDIPEEIKQLQQFQKEDAALTIYEMLQNIFAIFRQDSSSTGWNETIVENLLANVYHQINHLKTCLEEKLEKEDFTRGKLMSSLHLKRYYGRILHYLKAKEYSHCAWTIVRVEILRNFYFINRLTGYLRN

SEQ ID NO: 490 - protein, 166 aa, Homo sapiens
MSYNLCGFLQRSSNFQCQKLLWQLNGRLEYCLKDRMNFDIPEEIKQLQQFQKEDAALTIYEMLQNIFAIFRQDSSSTGWNETIVENLLANVYHQINHLKTVLEEKLEKEDFTRGKLMSSLHLKRYYGRILHYLKAKEYSHCAWTIVRVEILRNFYFINRLTGYLRN

SEQ ID NO: 491 - protein, 166 aa, Homo sapiens
MSYNLLGFLQRSSNFQCQKLLWQLNGRLEYCLKDRMNFDIPEEIKQLQQFQKEDAALTIYEMLQNIFAIFRQDSSSTGWNETIVENLLANVYHQINHCKTVLEEKLEKEDFTRGKLMSSLHLKRYYGRILHYLKAKEYSHCAWTIVRVEILRNFYFINRLTGYLRN

SEQ ID NO: 492 - protein, 166 aa, Homo sapiens
MSYNLLGFLCRSSNFQCQKLLWQLNGRLEYCLKDRMNFDIPEEIKQLQQFQKEDAALTIYEMLQNIFAIFRQDSSSTGWNETIVENLLANVYHQINHLKTVLEEKLEKEDFTRGKLMSSLHLKRYYGRILHYLKAKEYSHCAWTIVRVEILRNFYFINRLTGYLRN

SEQ ID NO: 493 - protein, 166 aa, Homo sapiens
MSYNLLGFLQRSSNFQCQKLLWQLNGRLEYCLKDRMNFDIPEEIKQLQQFQKEDAALTIYEMLQNIFAIFRQDSSSTGWNETIVENLLANVYHQINCLKTVLEEKLEKEDFTRGKLMSSLHLKRYYGRILHYLKAKEYSHCAWTIVRVEILRNFYFINRLTGYLRN

SEQ ID NO: 494 - protein, 166 aa, Homo sapiens
MSYNLLGFLQRSCNFQCQKLLWQLNGRLEYCLKDRMNFDIPEEIKQLQQFQKEDAALTIYEMLQNIFAIFRQDSSSTGWNETIVENLLANVYHQINHLKTVLEEKLEKEDFTRGKLMSSLHLKRYYGRILHYLKAKEYSHCAWTIVRVEILRNFYFINRLTGYLRN

SEQ ID NO: 495 - protein, 166 aa, Homo sapiens
MSYNLLGFLQRSSNFQCQKLLWQLNGRLEYCLKDRMNFDIPEEIKQLQQFQKEDAALTIYEMLQNIFAIFRQDSSSTGWNETIVENLLANVYHCINHLKTVLEEKLEKEDFTRGKLMSSLHLKRYYGRILHYLKAKEYSHCAWTIVRVEILRNFYFINRLTGYLRN

SEQ ID NO: 496 - protein, 166 aa, Homo sapiens
MSYNLLGFLQRSSNFCCQKLLWQLNGRLEYCLKDRMNFDIPEEIKQLQQFQKEDAALTIYEMLQNIFAIFRQDSSSTGWNETIVENLLANVYHQINHLKTVLEEKLEKEDFTRGKLMSSLHLKRYYGRILHYLKAKEYSHCAWTIVRVEILRNFYFINRLTGYLRN

SEQ ID NO: 497 - protein, 166 aa, Homo sapiens
MSYNLLGFLQRSSNFQCQKLLWQLNGRLEYCLKDRMNFDIPEEIKQLQQFQKEDAALTIYEMLQNIFAIFRQDSSSTGWNETIVENLLACVYHQINHLKTVLEEKLEKEDFTRGKLMSSLHLKRYYGRILHYLKAKEYSHCAWTIVRVEILRNFYFINRLTGYLRN

SEQ ID NO: 498 - protein, 166 aa, Homo sapiens
MSYNLLGFLQRSSNFQCQKLLWQLNGRLEYCLKDRMNFDIPEEIKQLQQFQKEDAALTIYEMLQNIFAIFRQDSSSTGWNETIVENLLANCYHQINHLKTVLEEKLEKEDFTRGKLMSSLHLKRYYGRILHYLKAKEYSHCAWTIVRVEILRNFYFINRLTGYLRN

SEQ ID NO: 499 - protein, 166 aa, Homo sapiens
  ref <308>: DATABASE ACCESSION NUMBER: Genbank AAC41702
  ref <309>: DATABASE ENTRY DATE: 1995-01-01
MSYNLLGFLQRSSNFQCQKLLWQLNGRLEYCLKDRMNFDIPEEIKQLQQFQKEDAALTIYEMLQNIFAIFRQDSSSTGWNETIVENLLANVYHQINHLKTVLEEKLEKEDFTRGKLMSSLHLKRYYGRILHYLKAKEYSHCAWTIVRVEILRNFYFINRLTGYLRN

SEQ ID NO: 500 - DNA, 46 bp, Artificial Sequence
  primer reverse INFA-E159H
aaggatcctcattccttacttcttaaactgtgttgcaagtttgttg

SEQ ID NO: 501 - DNA, 46 bp, Artificial Sequence
  primer reverse INFA-E159Q
aaggatcctcattccttacttcttaaactctgttgcaagtttgttg
